(19) United States
(12) Patent Application Publication
(10) Pub. No.: US 2020/0208133 A1
(43) Pub. Date: Jul. 2, 2020

(54) MODIFIED UROKINASE-TYPE PLASMINOGEN ACTIVATOR POLYPEPTIDES AND METHODS OF USE

(71) Applicant: Catalyst Biosciences, Inc., South San Francisco, CA (US)

(72) Inventors: Edwin L. Madison, San Francisco, CA (US); Christopher Thanos, Tiburon, CA (US); Vanessa Soros, San Francisco, CA (US); Mikhail Popkov, San Diego, CA (US); Kimberly Tipton, Boston, MA (US); Matthew John Traylor, Boulder, CO (US); Eric Steven Furfine, Lincoln, MA (US); Jeffrey Charles Way, Cambridge, MA (US)

(21) Appl. No.: 16/734,256

(22) Filed: Jan. 3, 2020

Related U.S. Application Data
(63) Continuation of application No. PCT/US19/68839, filed on Dec. 27, 2019.
(60) Provisional application No. 62/786,302, filed on Dec. 28, 2018.

(51) Int. Cl. C12N 9/72; C07K 14/765

(52) U.S. Cl. CPC C12N 9/6462; C12Y 304/21073; A61K 38/00; C07K 2319/02; C07K 2319/50; C07K 14/765

(57) ABSTRACT

Provided are u-PA polypeptides and fusion proteins containing the u-PA polypeptides. The u-PA polypeptides are modified to have altered activity and/or specificity so that they cleave a complement protein, such as complement protein C3, to thereby inhibit complement activation. The modified u-PA polypeptides and fusion proteins that inhibit complement activation can be used for treatment of diseases and conditions that are mediated by complement activation, or in which complement activation plays a role. These disorders include ischemic and reperfusion disorders, including myocardial infarction and stroke, sepsis, autoimmune diseases, diabetic retinopathies, age-related macular degeneration, transplanted organ rejection, inflammatory diseases and diseases with an inflammatory component.

### RELATED APPLICATIONS

[0001] This application is a continuation of International PCT application No. PCT/US2019/068839, entitled “MODIFIED UROKINASE-TYPE PLASMINOGEN ACTIVATOR POLYPEPTIDES AND METHODS OF USE,” filed Dec. 27, 2019, to inventors Edwin L. Madison, Christopher Thanos, Vanessa Soros, Mikhail Popkov, Kimberly Tipton, Matthew John Traylor, Eric Steven Furfine, and Jeffrey Charles Way, and applicant Catalyst Biosciences, Inc. International PCT application No. PCT/US2019/068839 claims priority, and benefit of priority to U.S. provisional application Ser. No. 62/786,302.

[0002] Benefit of priority is claimed to U.S. provisional application Ser. No. 62/786,302, entitled “MODIFIED UROKINASE-TYPE PLASMINOGEN ACTIVATOR POLYPEPTIDES AND METHODS OF USE,” filed Dec. 28, 2018, to inventors Edwin L. Madison, Christopher Thanos, Vanessa Soros, Mikhail Popkov, and Kimberly Tipton, and applicant Catalyst Biosciences, Inc.

[0003] Where permitted, the subject matter of each of these applications is incorporated by reference in its entirety.

### INCORPORATION BY REFERENCE OF SEQUENCE LISTING PROVIDED ELECTRONICALLY

[0004] An electronic version of the Sequence Listing is filed herewith, the contents of which are incorporated by reference in their entirety. The electronic file was created on Dec. 27, 2019, is 2,294 kilobytes in size, and is titled 4940seq001.txt. A substitute Sequence Listing is filed electronically herewith, the contents of which are incorporated by reference in their entirety. The electronic file was created on Jan. 17, 2020, is 2,294 kilobytes in size, and is titled 4940SEQ002.txt.

### FIELD OF THE INVENTION

[0005] Provided are modified u-PA polypeptides and fusion proteins that cleave a complement protein, thereby, inhibiting complement activation. By virtue of this inhibition the modified u-PA polypeptides and fusion proteins can be used for treatment of diseases and conditions mediated by complement or in which complement activation plays a role. These diseases and conditions, include, but are not limited to, ophthalmic indications, including macular degeneration, such as age-related macular degeneration (AMD) and Stargardt disease, renal delayed graft function (DGF), ischemic and reperfusion disorders, including myocardial infarction and stroke, sepsis, autoimmune diseases, inflammatory diseases and diseases with an inflammatory component, including Alzheimer's Disease and other neurodegenerative disorders.

### BACKGROUND

[0006] The complement (C) system is part of the immune system and plays a role in eliminating invading pathogens and in initiating the inflammatory response. The complement system of humans and other mammals involves more than 30 soluble and membrane-bound proteins that participate in an orderly sequence of reactions resulting in complement activation. The blood complement system has a wide array of functions associated with a broad spectrum of host defense mechanisms including anti-microbial and anti-viral actions. Products derived from the activation of C components include the non-self-recognition molecules C3b, C4b and C5b, as well as the anaphylatoxins C3a, C4a and C5a that influence a variety of cellular immune responses. These anaphylatoxins also act as pro-inflammatory agents.

[0007] The complement system is composed of an array of enzymes and non-enzymatic proteins and receptors. Complement activation occurs by one of three primary modes known as the “classical” pathway, the “alternative” pathway and the “lectin” pathway (see FIG. 1). Complement typically is activated or triggered by 1 of these 3 pathways, which, as shown in FIG. 1, converge at C3 activation. In a fourth complement-activation mechanism, referred to as the intrinsic pathway, serine proteases associated with the coagulation/fibrinolytic cascade activate the complement system directly through cleavage of C3 or C5, independently of the classical, alternate, and lectin pathways.

[0008] These pathways can be distinguished by the process that initiates complement activation. The classical pathway is initiated by antibody-antigen complexes or aggregated forms of immunoglobulins; the alternative pathway is initiated by the recognition of structures on microbial and cell surfaces; and the lectin pathway, which is an antibody-independent pathway, is initiated by the binding of mannan binding lectin (MBL, also designated mannose binding protein) to carbohydrates such as those that are displayed on the surface of bacteria or viruses. Activation of the cascades results in production of complexes involved in proteolysis or cell lysis and peptides involved in opsonization, anaphylaxis and chemotaxis.

[0009] The complement cascade, which is a central component of an animal's immune response, is an irreversible cascade. Numerous protein cofactors regulate the process. Inappropriate regulation, typically inappropriate activation, of the process can be a facet of, or can occur in a variety of disorders that involve inappropriate inflammatory and immune responses, such as those observed in acute and chronic inflammatory diseases and other conditions involving an inappropriate immune response. These diseases and disorders include autoimmune diseases, such as rheumatoid arthritis and lupus, cardiac disorders and other inflammatory diseases, such as sepsis and ischemia-reperfusion injury.

[0010] Because of the involvement of the complement pathways in a variety of diseases and conditions, components of the complement pathways are targets for therapeutic intervention, particularly for inhibition of the pathway. Examples of such therapeutics include synthetic and natural small molecule therapeutics, antibody inhibitors, and recombinant soluble forms of membrane complement regulators. There are limitations to strategies for preparing such therapeutics. Small molecules have short half-lives in vivo and need to be continually infused to maintain complement inhibition thereby limiting their role, especially in chronic diseases. Therapeutic antibodies can result in an immune response in a subject, and thus can lead to complications in treatment, particularly treatments designed to modulate immune responses. Thus, there exists a need for therapeutics for treatment of complement-mediated diseases and diseases in which complement activation plays a role. These include acute and chronic inflammatory diseases. Accordingly, among the objectives herein, it is an objective to provide such therapeutics to target the activation of the complement cascade and to provide therapeutics and methods of treatment of diseases.

### SUMMARY

[0011] Provided are modified urokinase-type plasminogen activator (u-PA) polypeptides that include insertions, deletions and/or replacements of amino acids in the protease domain that result in increased cleavage activity on the complement protein C3 compared to wild-type u-PA protease domain (where the protease domain can include the replacement of the free Cys with Ser to reduce/eliminate aggregation). The modified u-PA polypeptides and fusion proteins are any that comprise the protease domain, such as full length activated protease, zymogen forms thereof, and fusion proteins the contain a modified u-PA polypeptide and a fusion partner that confers pharmacological property or activity. The modified u-PA polypeptides and fusion proteins containing the modified u-PA polypeptides, when in active form, inhibit complement activation. In particular these polypeptides and fusion proteins cleave C3 whereby C3 activity is inhibited or eliminated.

[0012] Modifications, including amino acid deletions, replacements and insertions, provided herein are in the protease domain. The modified u-PA polypeptides (and fusion proteins) include or are the protease domains. The modified u-PA polypeptides further can include post-translational and other modifications to other than the primary amino acid sequence, such as conjugation or linkage to other polypeptides and moieties that alter properties, such as serum half-life, and resistance to endogenous protease. Such modifications include, but are not limited to, linkage to albumin, linkage to multimerization domain(s), and PEGylation. Thus, modified u-PA polypeptides, can be modified by PEGylation, albumination, farnysylation, carboxylation, hydroxylation, phosphorylation, and other polypeptide modifications known in the art. Among the modifications is the replacement of a free cysteine, in the zymogen, such as C122, by chymotrypsin numbering, with serine or alanine, to reduce aggregation, particularly upon expression in vitro. This replacement is optional, and not necessarily included in polypeptides that to be pegylated or expressed in vivo.

[0013] The modified u-PA polypeptides and fusion proteins inactivate complement protein C3 by cleavage, thereby reducing, inhibiting or preventing complement activation. The modified u-PA polypeptides (and fusion proteins) cleave C3 to thereby inhibit complement activation. They cleave C3 at a site, such as in the active site of C3, that inactivates or inhibits C3 activity to thereby inhibit complement activation. The modified u-PA polypeptides provided herein were selected and designed to cleave within QHARASHLG, and in particular where P1-P1′ is RA (QHAR↓ASHL; see SEQ ID NO:47 residues 737-744, where cleavage is between residues 740 and 741). As a result, these modified u-PA polypeptides can be used as therapeutics for treating disorders, diseases and/or conditions in which complement activation plays a role such that inhibition thereof can treat the disorders, diseases and/or conditions. The modified u-PA polypeptides also can have reduced activity for a native substrate, such as plasminogen, compared to a wild-type u-PA or compared to one that just has the replacement corresponding to C122S, by chymotrypsin numbering.

[0014] Among the diseases and conditions for which the modified u-PA polypeptides and fusion proteins are used for treatment are any C3-mediated or complement mediated or involved disease and conditions. These include ophthalmic disorders, such as age-related macular degeneration (AMD) and diabetic retinopathies, and organ rejection, such as renal Delayed Graft Function (DGF) as well as other diseases, disorders and conditions that can be treated by inhibiting complement activation. AMD is treated by administration to the vitreous humor, such as by intravitreal injection or intraretinal or subretinal injection, and DGF is treated by intravenous or other systemic administration. The modified u-PA polypeptides and fusion proteins further can be modified, such as by PEGylation, to enhance or improve or impart desirable pharmacological properties, including increased half-life and/or decreased immunogenicity. Other diseases and conditions include, for example, Rheumatoid arthritis (RA), ocular diseases, membranoproliferative glomerulonephritis (MPGN), Multiple Sclerosis (MS), Myasthenia gravis (MG), asthma, inflammatory bowel disease, immune complex (IC)-mediated acute inflammatory tissue injury, Alzheimer's Disease (AD), Ischemia-reperfusion injury, atypical hemolytic uremic syndrome (aHUS), and Complement 3 Glomerulopathy (C3G).

[0015] The unmodified u-PA polypeptides include precursor forms, mature forms, the catalytic domain, and catalytically active forms thereof, and also fusion proteins, such as those described in Examples 14-16. Exemplary of the unmodified u-PA polypeptides are those whose sequences are set forth in SEQ ID NOs: 1-6. Included among the unmodified u-PA polypeptides are those in which the free cysteine in the catalytic domain (corresponding to C122 by chymotrypsin numbering) is replaced by another amino acid, such as S or A, particularly S, which does not alter catalytic activity, but decreases aggregation of the polypeptides. It is understood that all modified u-PA polypeptides can include a replacement, generally S, at the residue corresponding to C122 by chymotrypsin numbering.

[0016] Among the modified urokinase-type plasminogen activator (u-PA) polypeptides provided herein are those that contain one or more amino acid modifications selected from among replacements corresponding to R35Q, H37Y, V41R, V41L, Y40Q, D60aP, L97bA, T97aI, and H99Q, and conservative amino acid modifications therefor, whereby the modified u-PA polypeptide has increased activity/specificity for a complement protein compared to the unmodified active form of the u-PA polypeptide, where: the amino acid modifications are selected from among replacements, insertions and deletions; corresponding residues can be determined by alignment with the mature form of u-PA; the modified u-PA polypeptide cleaves a complement protein to thereby inhibit or reduce complement activation compared to the unmodified u-PA polypeptide that does not contain the amino acid modifications; residues are numbered by chymotrypsin numbering; the unmodified u-PA polypeptide comprises the sequence set forth in any of SEQ ID NOs: 1-6 (wild-type human full-length u-PA, wild-type protease (catalytic) domain u-PA, wild-type mature u-PA, full-length u-PA with the replacement corresponding to C122S, protease domain u-PA with the replacement corresponding to C122S, and mature u-PA with the replacement corresponding to C122S) and catalytically active fragment thereof that includes the amino acid replacement(s). The conservative modifications are selected from among R35Y, W, F or N; H37 R, Q, E, W or F, V41K, D60aS, T97aD, L or V, L97bG or S and H99N, by chymotrypsin numbering.

[0017] In particular, among these modified urokinase-type plasminogen activator (uPA) polypeptides are those containing one or more amino acid modifications selected from among replacements corresponding to R35Q, H37Y, V41R, V41L, Y40Q, D60aP, L97bA, T97aI, and H99Q.

[0018] The modified u-PA polypeptides have reduced activity and/or specificity for cleavage of a substrate sequence in plasminogen. The complement protein for which the polypeptides have increased specificity/activity is C3; cleavage inactivates C3. Exemplary of cleavage sites is within the active site of C3. Among the modified u-PA polypeptides are those that have increased activity for cleavage of C3 that is least 3-fold greater than the unmodified u-PA polypeptide of SEQ ID NO:5 (protease domain with the C122S replacement).

[0019] The modified u-PA polypeptides include those that contain the replacement H37Y, such as the replacements H37Y/V38E. The modified u-PA polypeptides include those that contain the replacements R35Y/H37K or R35Q/H37K, such as those that comprise the replacements R35Y/H37K/V38E or R35Q/H37K/V38E.

[0020] Also provided are the modified u-PA polypeptides, including those described above, that also contain the replacement L97bA and/or R35Q, and or H99Q, and/or D60aP, and/or T97aI.

[0021] The modified u-PA polypeptide can further include the amino acid replacement corresponding to T39Y, T39W, T39F, such as T39Y, or conservative replacements selected from T39M or T39L. Others of the modified u-PA polypeptides include or further include the amino acid replacements R35Q/H37Y and/or V38E/V41R/Y149R.

[0022] Others of the modified u-PA polypeptides are those that comprise the modification V41R, such as modified u-PA polypeptides comprising the modifications V38E/V41R, including those that further comprise a replacement at one or more of positions R35, H37 and V38. These include modified u-PA polypeptide in which the replacement at V38 is E, such as for example, modified u-PA polypeptides comprising R35Y/H37S/V38E/V41R, H37Y/V38E, and other combinations of residues that contribute to cleavage of C3 and/or stability, such as in a body fluid.

[0023] Among the modified u-PA polypeptides provided herein are that have an ED₅₀ for inactivation cleavage of C3 of less than or 100 nM, or 50 nM or 30 nM or 25 nM in an in vitro assay. Exemplary of these are those set forth in Table 14, where the ED₅₀ is 100 nM or less, or those set forth in Table 14, where the ED₅₀ is less than 50 nM, or those set forth in Table 14, where the ED₅₀ is less than 30 nM, or those set forth in Table 14, where the ED₅₀ less than 25 nM. Exemplar of an assay to assess ED₅₀ is one that comprises incubation of the substrate complement protein human C3 with various concentrations of each modified protease for 1 hour at 37° C. to determine the ED₅₀. In particular, the modified u-PA polypeptides are any that cleave C3 with an ED₅₀ of 50 nM or less.

[0024] The unmodified u-PA polypeptides can consist of the sequence of amino acids set forth in any of SEQ ID NOs: 1-6 or can include additional modifications, including additional insertions, and deletions. Any of the replacements, insertions or deletions herein can be included in the unmodified u-PA polypeptides, such as the protease domain, particularly the protease domain of SEQ ID NO:5. The modified u-PA polypeptide can have at least 85%, 90%, 91%, 92%, 93%, 94%, 95%, 96%, 97%, 98%, 99% or more sequence identity with the polypeptides of any of SEQ ID NOs: 1-6 or a catalytically active portion thereof. The modified u-PA polypeptides can contain 1 or up to 2, 3, 4, 5, 6, 7, 8, 9, 10, 11, 12, 13, 14, 15, 16, or 17 amino acid replacements, insertions or deletions, compared to the unmodified u-PA polypeptide of any of SEQ ID NOs: 1-6 or a catalytically active portion thereof.

[0025] Hence, provided are modified u-PA polypeptides that contain the modification V41R, or H37Y, or L97bA, or R35Q, or H99Q, or D60aP, or T97aI or combinations thereof. Any of the modified u-PA polypeptides can further contain the amino acid replacement corresponding to T39Y, T39W, T39F or conservative replacements thereof selected from T39M or T39L. In particular, the modified u-PA polypeptides can further contain the amino acid replacement T39Y, such as the combination T39Y/V41R, and up to 12 or 13 additional modifications as well as the optional C122S. Any of the modified u-PA polypeptides further can contain the amino acid replacement V38E, and can further contain one or more of the amino acid modifications R35Q, Y60bQ and/or Y149R. Any of the modified u-PA polypeptides can further contain the amino acid modification R37aE or R37aS. Hence, modified u-PA polypeptides provided herein can contain the replacements R35Q/H37Y/T39Y/V41R or R35Q/H37Y/T39Y/V41R/C122S. Any of the modified u-PA polypeptides can contain the replacement corresponding to H99Q.

[0026] Among the modified u-PA polypeptides provided herein are those that contain the amino acid modifications R35Q/H37Y/T39Y/V41R/L97bA/H99Q/C122S or R35Q/H37Y/T39Y/V41R/L97bA/H99Q, or T39Y/V41R/Y60bQ/L97bA/H99Q or T39Y/V41R/Y60bQ/L97bA/H99Q/C122S or T39Y/V41R/D60aP/L97bA/H99Q/C122S or T39Y/V41R/D60aP/L97bA/H99Q/C122S. Also among the modified u-PA polypeptides provided herein are those that contain the amino acid modifications corresponding to Y40Q/V41L/L97bA/C122S or Y40Q/V41R/L97bA/C122S or Y40Q/V41L/L97bA or Y40Q/V41R/L97bA or R37aS/V41R/L97bG/H99Q or R37aS/V41R/L97bG/H99Q/C122S or T39Y/V41L/L97bA/H99Q/C122S or T39Y/V41R/L97bA/H99Q/C122S.

[0027] Included among the modified u-PA polypeptides are those that contain the modifications:

### R35Q/H37Y/R37aE/V38E/T39Y/V41R/D60aP/Y60bQ/T97aI/L97bA/H99Q/C122S/Y149R or

### R35Q/H37Y/R37aE/V38E/T39Y/V41R/D60aP/Y60bQ/T97aI/L97bA/H99Q/Y149R.

[0028] Provided are modified u-PA polypeptides that contain the amino acid modifications, included are polypeptides with the modifications:

### H37Y/R37aE/V38E/T39Y/V41R/D60aP/Y60bQ/T97aI/L97bA/H99Q/C122S/Y149R; or

### R35Q/R37aE/V38E/T39Y/V41R/D60aP/Y60bQ/T97aI/L97bA/H99Q/C122S/Y149R; or

### R35Q/H37Y/V38E/T39Y/V41R/D60aP/Y60bQ/T97aI/L97bA/H99Q/C122S/Y149R; or

### R35Q/H37Y/R37aE/T39Y/V41R/D60aP/Y60bQ/T97aI/L97bA/H99Q/C122S/Y149R; or

### R35Q/H37Y/R37aE/V38E/V41R/D60aP/Y60bQ/T97aI/L97bA/H99Q/C122S/Y149R; or

### R35Q/H37Y/R37aE/V38E/T39Y/D60aP/Y60bQ/T97aI/L97bA/H99Q/C122S/Y149R; or

### R35Q/H37Y/R37aE/V38E/T39Y/V41R/Y60bQ/T97aI/L97bA/H99Q/C122S/Y149R; or

### R35Q/H37Y/R37aE/V38E/T39Y/V41R/D60aP/T97aI/L97bA/H99Q/C122S/Y149R; or

### R35Q/H37Y/R37aE/V38E/T39Y/V41R/D60aP/Y60bQ/L97bA/H99Q/C122S/Y149R; or

### R35Q/H37Y/R37aE/V38E/T39Y/V41R/D60aP/Y60bQ/T97aI/H99Q/C122S/Y149R; or

### R35Q/H37Y/R37aE/V38E/T39Y/V41R/D60aP/Y60bQ/T97aI/L97bA/C122S/Y149R; or

### R35Q/H37Y/R37aE/V38E/T39Y/V41R/D60aP/Y60bQ/T97aI/L97bA/H99Q/C122S or

### R35Q/H37Y/R37aE/V38E/T39Y/V41R/D60aA/Y60bP/T97aI/L97bA/H99Q/C122S/Y149R or

### R35L/H37D/R37aS/V38E/T39Y/V41R/D60aP/Y60bD/T97aI/L97bA/H99Q/C122S/Y149R or

### R35M/H37G/R37aD/V38E/T39W/V41R/D60aP/Y60bD/T97aI/L97bA/H99Q/C122S/Y149R or

### R35Q/H37G/R37aP/V38E/T39Y/V41R/D60aP/Y60bE/T97aI/L97bA/H99Q/C122S/Y149R or

### R35A/H37G/R37aE/V38E/T39F/V41R/D60aE/Y60bP/T97aI/L97bA/H99Q/C122S/Y149R or

### R35Q/H37S/R37aE/V38E/T39Y/V41R/D60aP/Y60bS/T97aI/L97bA/H99Q/C122S/Y149R or

### R35Q/H37T/R37aP/V38E/T39Y/V41R/D60aE/Y60bD/T97aI/L97bA/H99Q/C122S/Y149R or

### R35Q/H37G/R37aE/V38E/T39H/V41R/D60aP/Y60bA/T97aI/L97bA/H99Q/C122S/Y149R or

### R35W/H37D/R37aS/V38E/T39Y/V41R/D60aE/Y60bS/T97aI/L97bA/H99Q/C122S/Y149R or

### R35Q/H37G/R37aE/V38E/T39Y/V41R/D60aP/Y60bT/T97aI/L97bA/H99Q/C122S/Y149R or

### R35W/H37P/R37aN/V38E/T39Y/V41R/D60aP/Y60bL/D97T/T97aE/L97bG/A98S/H99L/C122S or

### R35W/H37P/R37aN/V38E/T39Y/V41K/D60aP/Y60bD/T97aI/L97bA/H99Q/C122S/Y151L/Q192A or

### R35Y/H37V/R37aW/V38E/T39Y/V41R/D60aP/Y60bE/T97aI/L97bA/H99Q/C122S/Y151L/Q192T or

### R35W/H37P/R37aN/V38E/T39Y/V41K/D60aP/Y60bD/T97aI/L97bA/H99Q/C122S/Y151L/Q192T or

[0029] each with no replacement at C122. Exemplary of these modified u-PA polypeptides are those that contain the modifications

### R35Q/H37Y/R37aE/V38E/T39Y/V41R/D60aP/Y60bQ/T97aI/L97bA/H99Q/C122S/Y149R.

[0030] Exemplary of these polypeptides are those whose sequences are set forth in any of SEQ ID NOs:8-44 and 987, such as 21 and 39-44 as well as precursor and full-length modified u-PA polypeptides that contain the polypeptides whose sequences are set forth in SEQ ID NOs:8-44 and catalytically active portions thereof. It also is understood that in any of the modified u-PA polypeptides provided herein the Cys at residue 122, by chymotrypsin numbering, can be substituted with Ser, or can remain Cys. The Cys is retained for embodiments in which the polypeptide, including fusion proteins, containing the modified u-PA protease domain is intended for use as a two chain form in which the free C122 forms a disulfide bond with another free Cys in the polypeptide, or the Cys is modified, such as by PEGylation. In all embodiments described herein, position 122 can be Cys or Ser. The skilled person can select the appropriate residue depending upon the intended use.

[0031] The unmodified u-PA polypeptide comprises the protease domain of any of SEQ ID NOs: 1-6, or a catalytically active portion thereof, including or containing only the protease domain of SEQ ID NO:2 or SEQ ID NO:5.

[0032] The modified u-PA polypeptide can contain additional modifications, including post-translational modifications, modifications that introduce or remove a glycosylation site, modification, such as linkage or conjugation to a polymer, such as a PEG to increase serum half-life and/or to reduce immunogenicity or both. In particular, any and all of the modified u-PA polypeptides described and provided herein can be PEGylated. Fusion proteins containing the modified u-PA polypeptides provided herein, such as fusion with an Fc domain, or a targeting agent specific for a targeted cell or antigen also are provided.

[0033] Among the modified u-PA polypeptides and fusion proteins provided herein are those that have stability of greater than 50% or 80% after incubation in PBS, or in a body fluid, such as aqueous humor or serum for 7 days. Also among the modified u-PA polypeptides are those that, when in active form, have at least 100-fold decreased activity on plasmin compared to a corresponding form of unmodified u-PA polypeptide.

[0034] Also among the modified u-PA polypeptides and fusion proteins provided herein are those that have an ED₅₀ for inactivation cleavage of C3 of less than or 100 nM, or 50 nM or 30 nM or 25 nM or 15 nM or 10 nM in an in vitro assay, such as any exemplified in the Examples herein. These include polypeptides that contain or are the protease domains set forth in Table 14, which lists numerous mutation strings and the ED₅₀ for modified u-PA polypeptide protease domains that exhibit the ED₅₀ assessed as described in Example 2. Modified u-PA polypeptides and fusion polypeptides that have an ED₅₀ of 100 nM or less, less than 50 nM, less than 30 nM, less than 25 nM, less than 15 nM, and less than 10 nM, are among those that can be used as protease domains, or in longer u-PA forms and/or in fusion proteins as described herein.

[0035] Provided are conjugated proteins, including fusion proteins containing a modified u-PA polypeptide or a catalytically active portion of any of the modified u-PA polypeptides fused to a non-protease polypeptide or a portion thereof. Non-protease polypeptides such as those that include a multimerization domain, such as an Fc domain, a polypeptide, such as albumin, that increases serum stability, or a protein transduction domain (PTD) are provided.

[0036] As discussed above, all of the modifications can be in the unmodified polypeptides whose sequences are set forth in any of SEQ ID NOs: 1-6 and catalytically active portions thereof. Included among the polypeptides are those in which the unmodified polypeptide has the sequence set forth in SEQ ID NO:5 (the protease domain with the C122S replacement).

[0037] Also provided are fusion proteins that contain the modified u-PA polypeptides provided herein and additional polypeptides, such as serum albumin, multimerization domains, signal sequences and other trafficking sequences and tags to facilitate expression and isolation. The fusion proteins also can include activation sequences to activate the u-PA portions. Active forms of the fusion proteins are produced upon expression, and removal of signal sequences, and any other processing and trafficking signals to result in active fusion proteins that cleave C3. The active forms of the fusion proteins include 2 chain activated forms and also dimers, such as the those resulting from inclusion of a multimerization domain.

[0038] Among the fusion proteins are those that contain a modified u-PA polypeptide or a catalytically active portion of a modified u-PA polypeptide, such as those in Table 14, that is fused to a non-protease polypeptide or a portion thereof. The fusion proteins also can include activation sequences, and, before processing, signal sequences and other trafficking signals. Non protease polypeptides, include, but are not limited to, any known to those of skill in the art to confer a desirable pharmaceutical activity or property, a multimerization domain, such as an Fc, a protein transduction domain (PTD), a hyaluronic acid binding domain (HABD), an antibody to target to a particular antigen. The fusion proteins also can include activation sequences, such as a native u-PA activation sequence or a furin activation sequence. Exemplary of furin activation sequences are those that are or comprise QSGQKTLRRRKR (SEQ ID NO:996) or QCGQKTLRRRKR (SEQ ID NO:995) or QSGQKTLRRKR (SEQ ID NO: 1044) or a furin activation sequence having at least 98% sequence identity thereto.

[0039] For example, fusion proteins that comprise any of the modified u-PA polypeptides as described or provided herein, and also include, prior to processing or activation, a signal sequence and the modified u-PA polypeptide or catalytically active portion thereof. Signal sequences to encode for secretion of the fusion proteins include, for example, a signal sequence from 11-2, u-PA, or IgGκ.

[0040] The fusion proteins can include a fusion partner, such as a multimerization domain, or a polypeptide that increases serum half-life, or one that confers another desirable pharmacological property or activity. Exemplary of these are an albumin, or an Fc domain, or a single chain antibody or other antigen binding fragment of an antibody, or a hyaluronic acid binding domain (HABD). Exemplary fusion partners include, but are not limited to, Tumor Necrosis factor-Stimulated Gene-6 (TSG-6); HSA, IgG Fc, an antibody or antigen binding fragment thereof, such as an anti-type II collagen antibody scFv fragment or an anti-VEGFR antibody or fragment thereof.

[0041] The fusion proteins also can include an activation sequence so that the resulting fusion protein containing u-PA is in an active form, such as a two chain form. Activation sequences can contain or be modified to contain a cysteine, which can form a disulfide bond with a free Cys, such as C122, in the modified u-PA polypeptide, whereby, upon activation, the resulting activated polypeptide comprises two chains. Exemplary activation sequences are a u-PA activation sequence and a furin activation sequence, and modified forms thereof, such an activation sequence that has the sequence set forth in any of SEQ ID NOs:995-998, 1041, and 1044 or a sequence having at least 98% or 99% sequence identity thereto.

[0042] Exemplary fusion proteins are those that contain an activation sequence, a modified u-PA polypeptide, and HSA, such as any comprising the sequence of amino acids set forth in any of SEQ ID NOs: 1014, 1015, 1016, 1019 and 1040 or a modified form thereof having at least 95%, 96%, 97%, 98%, 99% sequence identity (and containing the modifications in the sequence of the u-PA portion). For use in methods of treatment, the fusion proteins generally do not contain the signal sequence. For use in gene therapy methods, the nucleic acid can encode the signal sequence.

[0043] Provided are such fusion proteins, such as those containing the sequence of amino acids set forth in any of SEQ ID Nos: 1004-1019 and 1034-1040 or any having at least 95%, 96%, 97%, 98%, 99% sequence identity (and containing the modifications in the sequence of the u-PA portion). Exemplary of fusion proteins are those having the sequence of amino acids set forth in SEQ ID NO:1015 or 1019. In particular, the signal sequence is removed prior to use or upon expression in vivo or when produced in vitro. These include those that are in two-chain activated form containing an A chain and a B chain. For example, fusion proteins, where the B chain starts at residues IIGG of the modified u-PA polypeptide and ends at the C-terminus of the fusion protein, such as those containing a modified u-PA polypeptide and HSA, those containing the sequence of amino acids set forth in any of SEQ ID NOs:1005, 1011, 1014, 1015, and 1036, but lacking the signal sequence. Exemplary of fusion proteins in activated form is a fusion protein that contains an A chain of residues 21-178, and a B chain of residues 179- to the C-terminus of the protein with a disulfide linkage between residues 168-299. It is understood that these also include fusion proteins having at least 95%, 96%, 97%, 98%, 99% sequence identity (and containing the modifications in the sequence of the u-PA portion). For example, provided is a fusion protein containing an A chain and a B chain, where the A chain consists of residues 21-178 of SEQ ID NO:1015, and B chain consists of residues 179-1022; and the A and B chains are linked via a disulfide bridge between C168 and C299 of SEQ ID NO: 1015.

[0044] Other fusion proteins provided herein contain multimerization domains such that, upon processing, they form multimers, such as dimers that form via interaction of complementary multimerization domains, such as Fc domains.

[0045] Also provided are combinations, which can be packaged as a kit, that contain a first composition containing a modified u-PA polypeptide, including, as in all embodiments, fusion proteins, particularly those in activated form, or plurality thereof, and a second composition containing a second agent or agents for treating a complement-mediated disease or disorder. The second agent or agents, for example, can be an anti-inflammatory agent(s) or anticoagulant(s). Exemplary of such agents are an anti-inflammatory agent(s) selected from among any one or more of a nonsteroidal anti-inflammatory drug (NSAID), antimetabolite, corticosteroid, analgesic, cytotoxic agent, pro-inflammatory cytokine inhibitor, anti-inflammatory cytokines, B cell targeting agents, compounds targeting T antigens, adhesion molecule blockers, chemokine receptor antagonists, kinase inhibitors, PPAR-γ (gamma) ligands, complement inhibitors, heparin, warfarin, acenocoumarol, phenindione, EDTA, citrate, oxalate, argatroban, lepirudin, bivalirudin, and ximelagatran.

[0046] Provided are nucleic acid molecules that encode any of the modified u-PA polypeptides and fusion proteins provided herein. Also provided are vectors containing such nucleic acid molecules and encoding the modified u-PA polypeptides. Vectors include prokaryotic vectors, and eukaryotic vectors, including mammalian and insect vectors, such as a baculovirus vector, yeast vectors, such as Pichia and Saccharomyces, and viral vectors, such as a herpes virus simplex vector, or a vaccinia virus vector, an AAV vector, an adenoviral vector or a retroviral vector. The vectors can be expression vectors for production of the modified u-PA polypeptides and/or vectors, such as adenoviruses and AAV viruses, particularly those with tropism for the tissue of interest, such as liver or the eye, for gene therapy.

[0047] Provided are methods of producing the modified u-PA polypeptides by growing a cell containing a vector or nucleic acid encoding a modified u-PA polypeptide or fusion protein under conditions in which the vector is expressed, and, optionally, isolating or recovering the expressed modified u-PA polypeptide.

[0048] Also provided are isolated cells and cell cultures that contain the nucleic acid molecules or the vectors. The cells can be non-human cells, or human cell cultures, but do not include any zygotes or cells that develop into a human. Cells include mammalian cells and bacterial cells, including, but not limited to, bacterial cells, such as E. coli, CHO, Balb/3T3, HeLa, MT2, mouse NS0, BHK, insect cells, yeast cells and other cells routinely used for recombinant expression of polypeptides. Methods for producing the modified u-PA polypeptide include growing the cells under conditions whereby the encoded modified u-PA polypeptide is expressed and optionally isolating or purifying the modified u-PA polypeptide. Generally, the modified u-PA polypeptides and conjugates thereof, such as fusion proteins, are produced in cells that glycosylate the proteins. The isolated modified u-PA polypeptides can be further modified, such as by PEGylation.

[0049] Also provided are pharmaceutical compositions containing the modified u-PA polypeptides and fusion proteins and/or the nucleic acids and/or the vectors. Provided are uses of the pharmaceutical compositions, nucleic acids or modified u-PA polypeptides for inhibiting complement activation to thereby treat a disease or disorder mediated by complement activation or in which complement activation plays a role in the etiology or underlying etiology of the disease or disorder. In particular, provided are uses of the nucleic acid molecules and/or vectors for gene therapy for treating such diseases, disorders and conditions, mediated by or involving complement activation, where inhibition of complement activation effects treatment or amelioration of the disease or condition. Also provided are methods of treating a disease or condition mediated by or involving complement activation by administering the vectors or administering the nucleic acid molecules. In particular, the diseases, disorders and conditions are those in which inactivation of C3 to thereby inhibit or reduce complement activation effects treatment.

[0050] Complement mediated diseases, disorders or conditions or diseases, disorders and conditions in which complement activation plays a role in the etiology or underlying etiology, include, but are not limited to, any inflammatory disorder, sepsis, rheumatoid arthritis (RA), ocular or ophthalmic disease, cardiovascular disorders, membranoproliferative glomerulonephritis (MPGN), Multiple Sclerosis (MS), Myasthenia gravis (MG), asthma, inflammatory bowel disease, immune complex (IC)-mediated acute inflammatory tissue injury, Alzheimer's Disease (AD), ischemia-reperfusion injury, atypical hemolytic uremic syndrome (aHUS), Complement 3 Glomerulopathy (C3G), and organ transplant rejection, particularly delayed organ transplant rejection. Particular diseases and disorders include ocular or ophthalmic disorders, such as a macular degeneration or a diabetic retinopathy, or inflammation due to a transplanted organ. Included among the diseases, disorders and conditions are age-related macular degeneration (AMD) and delayed renal graft function (DGF).

[0051] Methods of inhibiting complement activation are provided. The methods are effected by contacting a modified u-PA polypeptide with complement protein C3, whereby complement protein C3 is cleaved such that complement activation is reduced or inhibited. Contacting can be effected in vitro, but generally is in vivo, by administering the modified u-PA polypeptide to a subject in whom complement inactivation or reduction is desired. Administration can be systemic, such as parenterally, including intravenously, or locally, such as by contacting an affected tissue, such as the eye. Administration to the eye includes by drops, by linking the modified u-PA polypeptide to a protein transduction domain, or by intravitreal injection, intraretinal, or subretinal injection, or other such method. For diseases and conditions, such as DGF, administration can be effected by intravenous administration. Other methods include subcutaneous and transdermal administration.

[0052] The methods and uses include treatment of any disease, disorder or condition where inhibition of complement activation leads to a reduction of inflammatory symptoms associated with a complement-mediated disease or disorder selected from among an inflammatory disorder, a neurodegenerative disorder, an ophthalmic disorder and a cardiovascular disorder. These include, but are not limited to, inflammatory diseases, conditions and disorders, sepsis, rheumatoid arthritis (RA), ocular disorders, membranoproliferative glomerulonephritis (MPGN), multiple sclerosis (MS), myasthenia gravis (MG), asthma, inflammatory bowel disease, immune complex (IC)-mediated acute inflammatory tissue injury, atypical hemolytic uremic syndrome (aHUS), complement 3 glomerulopathy (C3G), Alzheimer's Disease (AD), ophthalmic disorders, such as AMD and diabetic retinopathies, and ischemia-reperfusion injury. The ischemia-reperfusion injury can involve or be caused by an event or treatment selected from among myocardial infarct (MI), stroke, angioplasty, coronary artery bypass graft, cardiopulmonary bypass (CPB), and hemodialysis or a treatment of a subject. The treatment with the modified u-PA polypeptide is effected prior to treatment of a subject. Treatments include organ transplantation. The disease, disorder or condition include ophthalmic conditions or is an ocular disease or is rejection or inflammation due to a transplanted organ, such as a diabetic retinopathy or a macular degeneration. In particular, methods of treatment of age-related macular degeneration (AMD) are provided, as are methods of treatment of delayed renal graft function (DGF). Treatment can be effected intravenously or subcutaneously or locally, such as by injection of the modified u-PA polypeptide into the eye. Included is intravitreal or intraretinal, subretinal, injection or linking the modified u-PA polypeptide to a protein transduction domain to facilitate transduction into the vitreous humor. The modified u-PA polypeptide can be linked to or conjugated to moieties that effect targeting of the polypeptide to a particular organ or tissue, or that increase serum half-life or reduce immunogenicity, such as PEGylation and/or linkage to an Fc domain or to an antibody or antigen-binding portion thereof.

[0053] Hence, provided are methods for treating a subject with a complement-mediated disorder or condition or one in which complement activation plays a role in such disorder or condition, by administering a modified u-PA polypeptide provided herein. Such uses of the modified u-PA polypeptides and fusion proteins provided herein also are provided. The modified u-PA polypeptides and fusion proteins effect treatment or can be used for such treatment because they cleave complement protein C3 to thereby inhibit or reduce complement activation. Inhibition of complement activation leads to a reduction of inflammatory symptoms associated with a complement-mediated disorder, disease or condition that involves an inflammatory response, leading to a reduction of inflammatory symptoms associated with a complement-mediated disease, condition or disorder selected from among an inflammatory disorder, a neurodegenerative disorder and a cardiovascular disorder. These include ophthalmic conditions, such as diabetic retinopathy and macular degeneration, and also delayed organ rejection, such as DGF.

[0054] Dosages for the uses and methods and single dosage formulations are provided herein. A single dosage can be empirically determined by the skilled medical practitioner, and includes, for example, single dosages that are in the range from 0.1 mg to 1 mg for local administration, and 0.1 mg to 10, 15, 20, 30 mg or more for systemic, such as intravenous administration. The particular dosage depends upon the particular disorder or disease or condition, the subject treated, the stage of the disease, the disorder or condition, the route of administration, the regimen and other such parameters. Dosages can be repeated daily, every two, three, four, five, six, or seven days, at least bi-weekly, at least every two weeks, three weeks, four weeks or longer intervals. The particular regimen and dosage depend, for example, upon the disorder treated, the mode of administration, and particulars, such as weight, of the subject. Determination thereof is within the skill of the skilled medical practitioner.

[0055] Also provided are the methods, uses and combinations and modified u-PA polypeptides and fusion proteins, where the modified u-PA polypeptide comprises the modification V41R or V41L, particularly V41R, such as V41I or R and V38E, and those containing H37Y/V38E. Exemplary of such modified u-PA polypeptide are modified u-PA polypeptides that contain the modifications Y40Q/V41R/L97bA or Y40Q/V41L/L97BA or R37aS/V41R/L97bG/H99Q, or R35Q/H37Y/R37aE/V38E/T39Y/V41R/D60aP/Y60bQ/T97aI/L97bA/H99Q/Y149R. The modifications are in any unmodified u-PA polypeptide, including those set forth in any of SEQ ID NOs: 1-6, and catalytically active portions thereof that include the residue corresponding to V41. Exemplary of such modified u-PA polypeptides are the modified u-PA polypeptides that comprise the sequence of amino acid residues set forth in in SEQ ID NO: 21 or 987 or in any of SEQ ID NOs:40-44, or 40-44 without the modification at C122, by chymotrypsin numbering, and catalytically active portions thereof, and modified forms thereof, such as PEGylated forms, and fusion proteins and modified forms thereof.

[0056] Also provided are methods of treating disorders, such as DGF, by intravenously administering a modified u-PA polypeptide or fusion protein (in activated form) as described and provided herein, including the modified u-PA polypeptides that comprises the sequence of amino acid residues set forth in any of SEQ ID NOs:21 and 40-44, and modified forms thereof, such as PEGylated forms. A single dosage can be empirically determined by the skilled medical practitioner, and includes single dosages that are in the range from 0.1 mg to 1 mg. The dosage depends upon the subject, the severity or stage of the disease or disorder, such as DGF. Treatment can be repeated a plurality of times, such as two, three or four times a day, once a day, repeated every 1 day, 2 days, 3 days, 4 days, 5 days, 6 days, weekly, bi-monthly or monthly. The modified u-PA polypeptide can be one that comprises the replacements/insertions, by chymotrypsin numbering, R35Q/H37Y/R37aE/V38E/T39Y/V41R/D60aP/Y60bQ/T97aI/L97bA/H99Q/C122S/Y149R; and by mature numbering R20Q/H22Y/R23E/V27E/T28Y/V30R/D50P/Y51Q/T91 I/L92A/H94Q/C121S/Y148R. Exemplary thereof is the modified u-PA polypeptide that contains the protease domain set forth in SEQ ID NO:21 or a catalytically active portion thereof, or the full-length or precursor forms that contain the protease domain, and modified forms thereof, such as PEGylated forms and fusion proteins. Administration can be effected by any suitable method, including intravenous, subcutaneous, transdermal, local, intramuscular, oral, and other systemic administration routes. Generally the administered form of the modified u-PA polypeptides provided herein is an activated form, which generally, depending upon the components of the protein (see, e.g., Example 15), is a two chain form.

[0057] The methods as described herein as described above and below, include methods of treating an ophthalmic disorder or ocular disorder by administering any of the modified u-PA polypeptides, and modified forms thereof, such as PEGylated forms and fusion proteins, such as those containing a protein transduction domain, provided herein to the eye. Ophthalmic disorders, diseases or conditions, involving complement activation include diabetic retinopathies and macular degeneration, such as AMD. The dosage is as described above, and includes single dosages of 0.1 mg to 1 mg. Modified u-PA polypeptides include those that contain the replacements R35Q/H37Y/R37aE/V38E/T39Y/V41R/D60aP/Y60bQ/T97aI/L97bA/H99Q/C122S/Y149R or R35Q/H37Y/R37aE/V38E/T39Y/V41R/D60aP/Y60bQ/T97aI/L97bA/H99Q/Y149R, Y40Q/V41L/L97bA/C122S or Y40Q/V41R/L97bA/C122S or Y40Q/V41L/L97bA or Y40Q/V41R/L97bA, and those that contain the sequence of amino acid residues set forth in any of SEQ ID NOs:21 and 40-44 and catalytically active portions thereof, as well as modified forms thereof. Treatment can be repeated a plurality of times, such as once a day. Uses of the modified u-PA polypeptides and modified forms thereof for treating AMD or DGF are provided. The modified u-PA polypeptides include any described herein, including those that contain the replacements R35Q/H37Y/R37aE/V38E/T39Y/V41R/D60aP/Y60bQ/T97aI/L97bA/H99Q/C122S/Y149R or R35Q/H37Y/R37aE/V38E/T39Y/V41R/D60aP/Y60bQ/T97aI/L97bA/H99Q/Y149R or Y40Q/V41L/L97bA/C122S or Y40Q/V41R/L97bA/C122S or Y40Q/V41L/L97bA or Y40Q/V41R/L97bA, and modified forms thereof that are PEGylated or that are fusion proteins as described herein.

[0058] Also provided are combinations containing any of the modified u-PA polypeptides or fusion protein comprising the modified u-PA polypeptides or nucleic acid, including vectors, encoding the modified u-PA polypeptides or fusion proteins; and a second agent or agents for treating a complement-mediated disease or disorder. For example, the second agent or agents can be an anti-inflammatory agent(s) or anticoagulant(s), such as, but not limited to, an anti-inflammatory agent(s) selected from among any one or more of a nonsteroidal anti-inflammatory drug (NSAID), antimetabolite, corticosteroid, analgesic, cytotoxic agent, pro-inflammatory cytokine inhibitor, anti-inflammatory cytokine, B cell targeting agent, compound targeting T antigens, adhesion molecule blocker, chemokine receptor antagonist, kinase inhibitor, PPAR-γ (gamma) ligand, complement inhibitor, heparin, warfarin, acenocoumarol, phenindione, EDTA, citrate, oxalate, argatroban, lepirudin, bivalirudin, and ximelagatran.

[0059] Methods of treatment or prevention (reduction of the risk) of a complement mediated disease or disorder by administering the modified u-PA polypeptide, fusion protein, or nucleic acid, pharmaceutical compositions, or combinations, using the polypeptides, fusion proteins and nucleic acids for treatment or prevention are provided.

[0060] Exemplary of the modified u-PA polypeptides for the combinations, pharmaceutical compositions, methods, and uses are those that comprise the modification(s) V41R or V41L, or those that comprise the modifications V38E/V41R, or the modifications Y40Q/V41R/L97bA or Y40Q/V41L/L97bA or R37aS/V41R/L97bG/H99Q, or the modifications: R35Q/H37Y/R37aE/V38E/T39Y/V41R/D60aP/Y60bQ/T97aI/L97bA/H99Q/Y149R, and optionally C122S. The unmodified u-PA polypeptide can be the unmodified u-PA polypeptide comprises the sequence of amino acid residues set forth in SEQ ID NO:2 or SEQ ID NO:5, SEQ ID NO:3, or SEQ ID NO:6.

[0061] Provided are modified u-PA polypeptides and fusion proteins that comprise the sequence of amino acid residues set forth in SEQ ID NO: 21 or 987 or in any of SEQ ID Nos: 40-44, or 40-44, including those without the modification at C122, by chymotrypsin numbering, and nucleic acids encoding modified u-PA polypeptides and fusion proteins that have these sequences, and polypeptides and proteins that have at least 95% sequence identity thereto.

[0062] The methods of treatment include methods of treating delayed graft function (DGF), atypical hemolytic uremic syndrome (aHUS), Complement 3 Glomerulopathy (C3G), and age-related macular degeneration (AMD). Dosage depends upon the particular disorder. Administration can be systemic or local, such as, for treatment of ophthalmic disorders, intravitreal or subretinal. Dosage for ophthalmic diseases and disorders, can be, for example, 0.1 to 3 mg, or 0.1 to 2 mg, or 1 to 3 mg, or 1 to 10 mg. Treatment can be repeated a plurality of times, such as at least every 2 days, 3 days, 4 days, 5 days, 6 days, weekly, bi-monthly, monthly, every two months, every three months, or every four months, every 6 months, or longer intervals. The modified u-PA polypeptides and fusion proteins and nucleic acids include any described or provided or suggested herein that cleave C3. These include modified u-PA polypeptides, and fusion proteins that comprise or encode the modifications R35Q/H37Y/R37aE/V38E/T39Y/V41R/D60aP/Y60bQ/T97aI/L97bA/H99Q/Y149R, or R35Q/H37Y/R37aE/V38E/T39Y/V41R/D60aP/Y60bQ/T97aI/L97bA/H99Q/C122S/Y149R, such as any that comprise or encode the protease domain set forth in SEQ ID NO:21 or 987 or a catalytically active portion thereof.

[0063] Methods of making or producing the modified u-PA polypeptides or fusions proteins are provided. The methods are effected by culturing cells, such as mammalian cells and cell cultures (not including human zygotes) under conditions, whereby the encoded polypeptide or fusion protein is expressed, and optionally isolating the polypeptide or fusion protein. The polypeptide or fusion protein as isolated generally does not include a signal protein or other trafficking signal, which is removed by the cell. The modified u-PA polypeptide or fusion protein can be in activated two chain form, or can be further treated to produce a two chain activated form. Alternatively, the fusion protein can be one that contains a multimerization domain so that the fusion protein is a multimer, such as a dimer.

### BRIEF DESCRIPTION OF THE FIGURES

[0064] FIG. 1 depicts an overview of the classical, lectin, and alternative complement pathways and the activation of the terminal complement complex, the membrane attack complex (MAC). The figure depicts many of the more than 30 proteins that participate in the complement cascade, their action within the cascade, and where applicable, their points of convergence among the complement pathways. For example, the three pathways converge upon the generation of a C3 convertase, which cleaves C3 to form a C5 convertase yielding the formation of the MAC complex. The figure also depicts the generation of many of the complement cleavage products.

[0065] FIGS. 2A-2B are schematics of N-terminal u-PA fusion proteins. FIG. 2A is a schematic of N-terminal u-PA fusion proteins which contain the fusion partner (i.e., Fc)N-terminal to the u-PA catalytic domain. An exemplary N-terminal fusion protein is set forth in SEQ ID NO:1004, which contains human immunoglobulin light chain kappa (κ) signal sequence, Fc (Fusion partner), AGS (linker), the u-PA activation sequence, and a modified u-PA catalytic domain. FIG. 2B is a schematic of N-terminal wild-type protein which does not contain a fusion partner. An exemplary N-terminal wild-type protein is set forth in SEQ ID NO:1005, which contains human immunoglobulin light chain kappa (κ) signal sequence, the N-terminus of u-PA, u-PA activation sequence, and a modified u-PA catalytic domain.

[0066] FIGS. 3A-3C are schematics of C-terminal u-PA fusion proteins. FIG. 3A is a schematic of C-terminal u-PA fusion proteins which contain the fusion partner C-terminal to the u-PA catalytic domain where the fusion protein lacks an activation sequence N-terminal to the u-PA catalytic domain. An exemplary C-terminal fusion protein is set forth in SEQ ID NO: 1006, which contains a human IL2 Signal sequence (hIL2SP), a modified u-PA catalytic domain, a linker, and Fc (Fusion partner). Another exemplary C-terminal fusion protein is set forth in SEQ ID NO: 1007, which contains a human IL2 Signal sequence (hIL2SP), a modified u-PA catalytic domain, a linker, and HSA (human serum albumin as a fusion partner). Another exemplary C-terminal fusion protein is set forth in SEQ ID NO: 1008, which contains a human IL2 Signal sequence (hIL2SP), a modified u-PA catalytic domain, a linker, and a scFv that binds Collagen II (C2scFv) (Fusion partner). Another exemplary C-terminal fusion protein is set forth in SEQ ID NO: 1009, which contains a human IL2 Signal sequence (hIL2SP), a modified u-PA catalytic domain, a linker, and a HABD (hyaluronic acid binding domain (Fusion partner). Another exemplary C-terminal fusion protein is set forth in SEQ ID NO:1012, which contains a human IL2 Signal sequence (hIL2SP), the wild-type u-PA catalytic domain, a linker, and Fc (Fusion partner). Another exemplary C-terminal fusion protein is set forth in SEQ ID NO:1013, which contains a human IL2 Signal sequence (hIL2SP), the wild-type u-PA catalytic domain, a linker, and HSA (Fusion partner). FIG. 3B is a schematic of C-terminal u-PA fusion proteins which contain the fusion partner (i.e., Fc or HSA)C-terminal to the u-PA catalytic domain. An exemplary C-terminal fusion protein is set forth in SEQ ID NO:1010, which contains a human immunoglobulin light chain kappa (i) signal sequence, a furin activation sequence, a modified u-PA catalytic domain, a linker, and Fc (Fusion partner). Another exemplary C-terminal fusion protein is set forth in SEQ ID NO: 1016, which contains a human immunoglobulin light chain kappa (κ) signal sequence, a furin activation sequence, a modified u-PA catalytic domain, a linker, and HSA (Fusion partner). FIG. 3C is a schematic of u-PA fusion proteins which contain a fusion partner (i.e., Fc or HSA)C-terminal to the u-PA catalytic domain and a fusion partner (i.e., the wild-type N-terminus of u-PA)N-terminal to the u-PA catalytic domain. An exemplary fusion protein is set forth in SEQ ID NO:1011, which contains a human immunoglobulin light chain kappa (κ) signal sequence, the u-PA N-terminal domain, a modified u-PA catalytic domain, a linker, and Fc (Fusion partner). Another exemplary C-terminal fusion protein is set forth in SEQ ID NO:1014, which contains a human immunoglobulin light chain kappa (κ) signal sequence, the N-terminal region of u-PA, a furin activation sequence, a modified u-PA catalytic domain, a linker, and HSA (Fusion partner). Another exemplary C-terminal fusion protein is set forth in SEQ ID NO:1015, which contains a human immunoglobulin light chain kappa (κ) signal sequence, the N-terminal region of u-PA, the u-PA activation sequence, a modified u-PA catalytic domain, a linker, and HSA (Fusion partner).

[0067] FIGS. 4A-4H are schematics of the activated forms of the fusion proteins, where SPD refers to the Serine protease domain (the modified u-PA polypeptide protease domains provided herein; the u-PA N-terminus refers generally to residues 1-178 of u-PA or any modified forms thereof. FIG. 4A is a schematic of the fusion protein of SEQ ID NO: 1010, which contains an Fc domain at the C-terminus of the u-PA protease domain (SEQ ID NO: 21) and a furin activation sequence, where disulfide linkage between the Fc domains to form a dimer. FIG. 4B is a schematic of the fusion protein of SEQ ID NO: 1011, which contains an Fc domain at the C-terminus of the u-PA protease domain (SEQ ID NO: 987), and the N-terminus of u-PA and the u-PA activation sequence at the N-terminus of the protein, where disulfide linkage between the Fc domains to form a dimer. FIG. 4C is a schematic of the fusion protein set forth in SEQ ID NO: 1036, which contains an Fc domain at the C-terminus of the u-PA protease domain (SEQ ID NO: 987), and the N-terminus of u-PA and a furin activation sequence at the N-terminus of the fusion protein, where disulfide linkage between the Fc domains form a dimer. FIG. 4D is a schematic of the fusion protein set forth in SEQ ID NO: 1014, which contains HSA at the C-terminus of the u-PA protease domain (SEQ ID NO: 987), and the N-terminus of u-PA and a furin activation sequence at the N-terminus of the fusion protein. FIG. 4E is a schematic of the fusion protein set forth in SEQ ID NO: 1015, which contains HSA at the C-terminus of the u-PA protease domain (SEQ ID NO: 987), and the N-terminus of u-PA and the u-PA activation sequence at the N-terminus of the fusion protein. FIG. 4F is a schematic of the fusion protein set forth in SEQ ID NO: 1016, which contains HSA at the C-terminus of the u-PA protease domain (SEQ ID NO: 21) and a furin activation sequence N-terminal to the protease domain. FIG. 4G is a schematic of the fusion protein set forth in SEQ ID NO: 1017, which contains HSA at the C-terminus of the u-PA protease domain (SEQ ID NO: 21) and a SUMO activation sequence N-terminal to the protease domain. FIG. 4H is a schematic of the fusion protein set forth in SEQ ID NO: 1018, which contains an Fc domain at the C-terminus of the u-PA protease domain (SEQ ID NO: 21) and the N-terminus of u-PA and a SUMO activation sequence N-terminal to the protease domain, where a disulfide linkage between the Fc domains form a dimer.

### DETAILED DESCRIPTION

[0068] Outline
[0069] A. DEFINITIONS
[0070] B. u-PA STRUCTURE AND FUNCTION
   [0071] 1. Serine proteases
   [0072] 2. Structure
   [0073] 3. Function/activity
[0074] C. COMPLEMENT INHIBITION BY TARGETING C3
   [0075] 1. Complement Protein C3 and its Role in Initiating Complement
      [0076] a. Classical Pathway
      [0077] b. Alternative Pathway
      [0078] c. Lectin Pathway
      [0079] d. Complement-mediated effector functions
         [0080] i. Complement-mediated lysis: Membrane
         [0081] Attack Complex
         [0082] ii. Inflammation
         [0083] iii. Chemotaxis
         [0084] iv. Opsonization
         [0085] v. Activation of the Humoral Immune Response
   [0086] 2. C3 Structure and Function
      [0087] a. C3a
      [0088] b. C3b
      [0089] c. Inhibitors of C3b
[0090] D. MODIFIED U-PA POLYPEPTIDES THAT CLEAVE C3
   [0091] 1. Exemplary modified u-PA polypeptides
   [0092] 2. Additional Modifications
      [0093] a. Decreased immunogenicity
      [0094] b. Fc domain
      [0095] c. Conjugation to polymers
      [0096] d. Protein transduction domain
[0097] E. ASSAYS TO ASSESS OR MONITOR u-PA ACTIVITY ON COMPLEMENT-MEDIATED FUNCTIONS
   [0098] 1. Methods for assessing effects of u-PA on complement protein C3 activity
      [0099] a. Protein Detection
         [0100] i. SDS-PAGE analysis
         [0101] ii. Enzyme Immunoassay
         [0102] iii. Radial Immunodiffusion (RID)
      [0103] b. Hemolytic assays
      [0104] c. Methods for determining cleavage sites
[0105] 2. Methods for assessing wild type u-PA activity
   [0106] a. Cleavage of plasminogen
   [0107] b. Plasminogen Activation Assays
   [0108] c. u-PA-uPAR Binding Assays
   [0109] d. C3 cleavage
   [0110] ACC-AGR+ELISA
   [0111] Assessing specificity using peptide libraries
   [0112] 3. Specificity
   [0113] 4. Disease Models
[0114] F. METHODS OF PRODUCING NUCLEIC ACIDS ENCODING MODIFIED U-PA POLYPEPTIDES THEREOF
   [0115] 1. Isolation or Preparation of Nucleic Acids Encoding u-PA Polypeptides
   [0116] 2. Generation of Mutant or Modified Nucleic Acids and Encoding Polypeptides
   [0117] 3. Vectors and Cells
   [0118] 4. Expression
      [0119] a. Prokaryotic Cells
      [0120] b. Yeast Cells
      [0121] c. Insects and Insect Cells
      [0122] d. Mammalian Expression
      [0123] e. Plants
   [0124] 5. Purification
   [0125] 6. Additional Modifications
      [0126] a. PEGylation
      [0127] b. Fusion Proteins and other conjugates
   [0128] 7. Nucleic acid molecules
[0129] G. COMPOSITIONS, FORMULATIONS AND DOSAGES
   [0130] 1. Administration of modified u-PA polypeptides
   [0131] 2. Administration of nucleic acids encoding modified u-PA polypeptides (gene therapy)
[0132] H. THERAPEUTIC USES AND METHODS OF TREATMENT
   [0133] 1. Disease mediated by Complement activation
      [0134] a. Rheumatoid Arthritis
      [0135] b. Sepsis
      [0136] c. Multiple Sclerosis
      [0137] d. Alzheimer's Disease
      [0138] e. Ischemia-Reperfusion Injury
      [0139] f. Ocular disorders
   [0140] Age-Related Macular Degeneration (AMD)
      [0141] g. Organ transplantation and Delayed Graft Function (DGF)
   [0142] 2. Therapeutic Uses
      [0143] a. Immune-mediated Inflammatory Disease
      [0144] b. Neurodegenerative Disease
      [0145] c. Cardiovascular Disease
      [0146] d. Age-Related Macular Degeneration (AMD)
      [0147] e. Organ transplant
         [0148] Delayed Graft Function (DGF)
   [0149] 3. Combination Therapies
[0150] I. EXAMPLES

### A. DEFINITIONS

[0151] Unless defined otherwise, all technical and scientific terms used herein have the same meaning as is commonly understood by one of skill in the art to which the invention(s) belong. All patents, patent applications, published applications and publications, GENBANK sequences, websites and other published materials referred to throughout the entire disclosure herein, unless noted otherwise, are incorporated by reference in their entirety. In the event that there is a plurality of definitions for terms herein, those in this section prevail. Where reference is made to a URL or other such identifier or address, it is understood that such identifiers can change and particular information on the internet can come and go, but equivalent information is known and can be readily accessed, such as by searching the internet and/or appropriate databases. Reference thereto evidences the availability and public dissemination of such information.

[0152] As used herein, cleavage refers to the breaking of peptide bonds by a protease. The cleavage site motif for a protease involves residues N- and C-terminal to the scissile bond (the unprimed and primed sides, respectively, with the cleavage site for a protease defined as . . . P3-P2-P1-P1′-P2′-P3′ . . . , and cleavage occurs between the P1 and P1′ residues). In human C3, cleavage by a C3 convertase occurs between residues R and S (see residues 746-751 of SEQ ID NO: 47, cleavage between residues 748 and 749 in human C3) of C3:

P3 P2 P1 P1′ P2′ P3′
Leu Ala Arg ↓ Ser Asn Leu

[0153] Typically, cleavage of a substrate in a biochemical pathway is an activating cleavage or an inhibitory cleavage. An activating cleavage refers to cleavage of a polypeptide from an inactive form to an active form. This includes, for example, cleavage of a zymogen to an active enzyme. An activating cleavage also is cleavage whereby a protein is cleaved into one or more proteins that themselves have activity. For example, the complement system is an irreversible cascade of proteolytic cleavage events whose termination results in the formation of multiple effector molecules that stimulate inflammation, facilitate antigen phagocytosis, and lyse some cells directly. Thus, cleavage of C3 by a C3 convertase into C3a and C3b is an activation cleavage. In contrast, the modified u-PA polypeptides provided herein effect inhibitory cleavage of C3, such as by cleavage in the active site.

[0154] As used herein, an inhibitory cleavage or inactivation cleavage is cleavage of a protein into one or more degradation products that are not functional. Inhibitory cleavage results in the diminishment or reduction of an activity of a protein. Typically, a reduction of an activity of a protein reduces the pathway or process for which the protein is involved. In one example, the cleavage of any one or more complement proteins that is an inhibitory cleavage results in the concomitant reduction or inhibition of any one or more of the classical, lectin, or alternative functional pathways of complement. To be inhibitory, the cleavage reduces activity by at least or at least about 1%, 2%, 5%, 10%, 20%, 30%, 40%, 50%, 60%, 70%, 80%, 90%, 95%, 99% or more compared to a native form of the protein. The percent cleavage of a protein that is required for the cleavage to be inhibitory varies among proteins but can be determined by assaying for an activity of the protein.

[0155] As used herein, “complement activation” refers to the activation of complement pathways, for example complement activation refers to an increase in the functions or activities of any one or more of the complement pathways by a protease or an increase in the activity of any of the proteins in the complement pathway. Complement activation can lead to complement-mediated cell lysis or can lead to cell or tissue destruction. Inappropriate complement activation on host tissue plays an important role in the pathology of many autoimmune and inflammatory diseases, and also is responsible for or associated with many disease states associated with bioincompatibility. It is understood that activation can mean an increase in existing activity as well as the induction of a new activity. A complement activation can occur in vitro or in vivo. Exemplary functions of complement that can be assayed and that are described herein include hemolytic assays, and assays to measure any one or more of the complement effector molecules such as by SDS PAGE followed by Western Blot or Coomassie Brilliant Blue staining or by ELISA. In some embodiments, complement activation is inhibited by a protease, such as a protease described herein, by 40%, 50%, 60%, 70%, 80%, 85%, 90%, 95% or 99% or more compared to the activity of complement in the absence of a protease.

[0156] As used herein, “inhibiting complement activation” or “complement inactivation” refers to the reduction or decrease of a complement-mediated function or activity of any one or more of the complement pathways by a protease or in the activity of any of the proteins in a pathway. A function or activity of complement can occur in vitro or in vivo. Exemplary functions of complement that can be assayed and that are described herein include hemolytic assays, and assays to measure any one or more of the complement effector molecules such as by SDS PAGE followed by Western Blot or Coomassie Brilliant Blue staining or by ELISA. A protease can inhibit complement activation by 1%, 5%, 10%, 20%, 30%, 40%, 50%, 60%, 70%, 80%, 90% or more. In other embodiments, complement activation is inhibited by a protease by 40%, 50%, 60%, 70%, 80%, 85%, 90%, 95% or 99% or more compared to the activity of complement in the absence of a protease.

[0157] As used herein, a “complement protein” or a “complement component” is a protein of the complement system that functions in the host's defense against infections and in the inflammatory process. Complement proteins include those that function in the classical pathway, those that function in the alternative pathway, and those that function in the lectin pathway. Among the complement proteins are proteases that participate in the complement pathways.

[0158] As used herein, complement proteins include any of the “cleavage products” (also referred to as “fragments”) that are formed upon activation of the complement cascade. Also included among complement proteins are inactive or altered forms of complement proteins, such as iC3b and C3a-desArg. Thus, complement proteins include, but are not limited to: C1q, C1r, C1s, C2, C3, C3a, C3b, C3c, C3dg, C3g, C3d, C3f, iC3, C3a-desArg, C4, C4a, C4b, iC4, C4a-desArg, C5, C5a, C5a-des-Arg, C6, C7, C8, C9, MASP-1, MASP-2, MBL, Factor B, Factor D, Factor H, Factor I, CR1, CR2, CR3, CR4, properdin, C1Inh, C4 bp, MCP, DAF, CD59 (MIRL), clusterin and HRF and allelic and species variants of any complement protein.

[0159] As used herein, a “native” form of a complement protein is one which can be isolated from an organism such as a vertebrate in the absence of complement activation, and which has not been intentionally modified by man in the laboratory. Examples of native complement proteins include C1q, C1r, C1s, C2, C3, C4, Factor B, Factor D, properdin, C5, C6, C7, C6, and C9.

[0160] Generally, “native complement proteins” are inactive and acquire activity upon activation. Activation can require activation cleavage, maturation cleavage and/or complex formation with other proteins. An exception to this is Factor I and Factor D which have enzymatic activity in their native form. In some examples, activation of a native complement protein occurs following cleavage of the protein. For example, complement zymogens such as C3 are proteases which are themselves activated by protease cleavage such that cleavage of C3 by the C3 convertase C4b2b generates the active fragments C3a and C3b. In another example, cleavage of an inactive native complement protein results in changes in the structural stability of a protein resulting in activation of the protein. For example, C3 contains an internal thioester bond which in the native protein is stable, but can become highly reactive and activated following conformational changes that result from cleavage of the protein. Thus, the cleavage products of C3 is biologically active. Activation of C3 also can occur spontaneously in the absence of cleavage. It is the spontaneous conversion of the thioester bond in native C3 that is an initiating event of the alternative pathway of complement. In other example, activation of a native complement protein occurs following the release of a complexed regulatory molecule that inhibits the activity of an otherwise active native complement protein. For example, C1inh binds to and inactivates C1s and C1r, unless they are in complex with C1q.

[0161] As used herein, “maturation cleavage” is a general term that refers to any cleavage required for activation of a zymogen. This includes cleavage that leads to a conformational change resulting in activity (i.e. activation cleavage). It also includes cleavage in which a critical binding site is exposed or a steric hindrance is exposed or an inhibitory segment is removed or moved.

[0162] As used herein, “altered form” of a complement protein refers to a complement protein that is present in a non-native form resulting from modifications in its molecular structure. For example, C3 reaction of the thioester with water can occur in the absence of convertase cleavage, giving a hydrolyzed inactive form of C3 termed iC3. In another example, anaphylatoxins including C3a, C5a, and C4a can be desarginated by carboxypeptidase N into more stable, less active forms.

[0163] As used herein, a “fragment” or “cleavage product” of a complement protein is a region or segment of a complement protein that contains a portion of the polypeptide sequence of a native complement protein. A fragment of a complement protein usually results following the activation of a complement cascade. Generally, a fragment results from the proteolytic cleavage of a native complement protein. For example, complement protein C3 is enzymatically cleaved by a C3 convertase, resulting in two fragments: C3a which constitutes the N-terminal portion of C3; and C3b which constitutes the C-terminal portion and contains the serine protease site. A fragment of a complement protein also results from the proteolytic cleavage of another fragment of a complement protein. For example, C3b, a fragment generated from the cleavage of C3, is cleaved by Factor I to generate the fragments iC3b and C3f. Generally cleavage products of complement proteins are biologically active products and function as cleavage effector molecules of the complement system. Hence a fragment or portion of complement protein includes cleavage products of complement proteins and also portions of the proteins that retain or exhibit at least one activity of a complement protein.

[0164] As used herein, “cleavage effector molecules” or “cleavage effector proteins” refers to the active cleavage products generated as a result of the triggered-enzyme cascade of the complement system. A cleavage effector molecule, a fragment or a cleavage product resulting from complement activation can contribute to any of one or more of the complement-mediated functions or activities, which include opsonization, anaphylaxis, cell lysis and inflammation. Examples of cleavage or effector molecules include, but are not limited to, C3a, C3b, C4a, C4b, C5a, C5b-9, and Bb. Cleavage effector molecules of the complement system, by virtue of participation in the cascade, exhibit activities that include stimulating inflammation, facilitating antigen phagocytosis, and lysing some cells directly. Complement cleavage products promote or participate in the activation of the complement pathways.

[0165] As used herein, “anaphylatoxins” are cleavage effector proteins that trigger degranulation of, or release of substances from, mast cells or basophils, which participate in the inflammatory response, particularly as part of defense against parasites. If the degranulation is too strong, it can cause allergic reactions. Anaphylatoxins include, for example, C3a, C4a and C5a. Anaphylatoxins also indirectly mediate spasms of smooth muscle cells (such as bronchospasms), increases in permeability of blood capillaries, and chemotaxis.

[0166] As used herein, “chemotaxis” refers to receptor-mediated movement of leukocytes towards a chemoattractant typically in the direction of the increasing concentration thereof, such as in the direction of increasing concentration of an anaphylatoxin.

[0167] As used herein, “opsonization” refers to the alteration of the surface of a pathogen or other particle so that it can be ingested by phagocytes. A protein that binds or alters the surface of a pathogen is termed an opsonin. Antibody and complement proteins opsonize extracellular bacteria for uptake and destruction by phagocytes such as neutrophils and macrophages.

[0168] As used herein, “cell lysis” refers to the breaking open of a cell by the destruction of its wall or membrane. Hemolysis of red blood cells is a measure of cell lysis.

[0169] As used herein, “complement protein C3” or “C3” refers to complement protein C3 of the complement system that functions in the host defense against infections and in the inflammatory process. Human complement protein C3 is a 1663 amino acid single-chain pre-proprotein or zymogen set forth in SEQ ID NO:47 that that contains a 22 amino acid signal peptide (amino acids 1-22 of SEQ ID NO:47) and a tetra-arginine sequence (amino acids 678-671 of SEQ ID NO:47) that is removed by a furin-like enzyme resulting in a mature two chain protein containing a beta chain (amino acids 23-667 of SEQ ID NO:47) and an alpha chain (amino acids 672-1663 of SEQ ID NO:47) linked by a disulfide bond between residues C559 and C816. Complement protein C3 is further activated by proteolytic cleavage by a C3 convertase (C4b2b or C3bBb) between amino acids 748 and 749 of SEQ ID NO:47 generating the anaphylatoxin C3a and the opsonin C3b.

[0170] As used herein, a “zymogen” refers to a protein that is activated by proteolytic cleavage, including maturation cleavage, such as activation cleavage, and/or complex formation with other protein(s) and/or cofactor(s). A zymogen is an inactive precursor of a protein. Such precursors are generally larger, although not necessarily larger, than the active form. With reference to u-PA or complement protein C3, zymogens are converted to active enzymes by specific cleavage, including catalytic and autocatalytic cleavage, or by binding of an activating co-factor, which generates an active enzyme. A zymogen, thus, is an enzymatically inactive protein that is converted to a proteolytic enzyme by the action of an activator. Cleavage can be effected autocatalytically. A number of complement proteins are zymogens; they are inactive, but become cleaved and activated upon the initiation of the complement system following infection. Zymogens, generally, are inactive and can be converted to mature active polypeptides by catalytic or autocatalytic cleavage of the proregion from the zymogen.

[0171] As used herein, a “proregion,” “propeptide,” or “pro sequence,” refers to a region or a segment of a protein that is cleaved to produce a mature protein. This can include segments that function to suppress enzymatic activity by masking the catalytic machinery and thus preventing formation of the catalytic intermediate (i.e., by sterically occluding the substrate binding site). A proregion is a sequence of amino acids positioned at the amino terminus of a mature biologically active polypeptide and can be as little as a few amino acids or can be a multidomain structure.

[0172] As used herein, an “activation sequence” refers to a sequence of amino acids in a zymogen that is the site required for activation cleavage or maturation cleavage to form an active protease. Cleavage of an activation sequence can be catalyzed autocatalytically or by activating partners. Activation cleavage is a type of maturation cleavage in which a conformational change required for activity occurs. This is a classical activation pathway, for example, for serine proteases in which a cleavage generates a new N-terminus which interacts with the conserved regions of catalytic machinery, such as catalytic residues, to induce conformational changes required for activity. Activation can result in production of multi-chain forms of the proteases. In some instances, single chain forms of the protease can exhibit proteolytic activity.

[0173] As used herein, “domain” refers to a portion of a molecule, such as proteins or the encoding nucleic acids, that is structurally and/or functionally distinct from other portions of the molecule and is identifiable. An exemplary polypeptide domain is a part of the polypeptide that can form an independently folded structure within a polypeptide made up of one or more structural motifs (e.g., combinations of alpha helices and/or beta strands connected by loop regions) and/or that is recognized by a particular functional activity, such as enzymatic activity, dimerization or substrate-binding. A polypeptide can have one or more, typically more than one, distinct domains. For example, the polypeptide can have one or more structural domains and one or more functional domains. A single polypeptide domain can be distinguished based on structure and function. A domain can encompass a contiguous linear sequence of amino acids. Alternatively, a domain can encompass a plurality of non-contiguous amino acid portions, which are non-contiguous along the linear sequence of amino acids of the polypeptide. Typically, a polypeptide contains a plurality of domains. For example, serine proteases can be characterized based on the sequence of protease domain(s). Those of skill in the art are familiar with polypeptide domains and can identify them by virtue of structural and/or functional homology with other such domains. For exemplification herein, definitions are provided, but it is understood that it is well within the skill in the art to recognize particular domains by name. If needed, appropriate software can be employed to identify domains.

[0174] As used herein, a “structural region” of a polypeptide is a region of the polypeptide that contains at least one structural domain.

[0175] As used herein, a “protease domain” is the catalytically active portion of a protease. Reference to a protease domain of a protease includes the single, two- and multi-chain forms of any of these proteins. A protease domain of a protein contains all of the requisite properties of that protein required for its proteolytic activity, such as for example, its catalytic center.

[0176] As used herein, a “catalytically active portion” or “catalytically active domain” of a protease, for example a u-PA polypeptide, refers to the protease domain, or any fragment or portion thereof that retains protease activity. For example, a catalytically active portion of a u-PA polypeptide can be a u-PA protease domain including an isolated single chain form of the protease domain or an activated two-chain form. Significantly, at least in vitro, the single chain forms of the proteases and catalytic domains or proteolytically active portions thereof (typically C-terminal truncations) exhibit protease activity.

[0177] As used herein, a “nucleic acid encoding a protease domain or catalytically active portion of a protease” refers to a nucleic acid encoding only the recited single chain protease domain or active portion thereof, and not the other contiguous portions of the protease as a continuous sequence.

[0178] As used herein, recitation that a polypeptide consists essentially of the protease domain means that the only portion of the polypeptide is a protease domain or a catalytically active portion thereof. The polypeptide optionally can, and generally include additional non-protease-derived sequences of amino acids.

[0179] As used herein, an “active site of a protease” refers to the substrate binding site where catalysis of the substrate occurs. The structure and chemical properties of the active site allow the recognition and binding of the substrate and subsequent hydrolysis and cleavage of the scissile bond in the substrate. The active site of a protease contains amino acids that contribute to the catalytic mechanism of peptide cleavage, such as amino acids Gln His Ala Arg Ala Ser His Leu (active site of C3; residues 737-744 of SEQ ID NO:47) as well as amino acids that contribute to substrate sequence recognition, such as amino acids that contribute to extended substrate binding specificity. For example, cleavage in the active site of C3 can inhibit its activity, such as:

Q H A R ↓ A S H L (residues 737-744 of SEQ ID NO: 47)
P4 P3 P2 P1 ↓P1′ P2′ P3′ P4′.

[0180] As used herein, the “substrate recognition site” or “cleavage sequence” refers to the sequence recognized by the active site of a protease that is cleaved by a protease. Typically, a cleavage sequence for a serine protease is six residues in length to match the extended substrate specificity of many proteases, but can be longer or shorter depending upon the protease. Typically, for example, for a serine protease, a cleavage sequence is made up of the P1-P4 and P1′-P4′ amino acids in a substrate, where cleavage occurs after the P1 position. Typically, a cleavage sequence for a serine protease is six residues in length to match the extended substrate specificity of many proteases, but can be longer or shorter depending upon the protease.

[0181] As used herein, “target substrate” refers to a substrate that is cleaved by a protease. Typically, the target substrate is specifically cleaved at its substrate recognition site by a protease. Minimally, a target substrate includes the amino acids that make up the cleavage sequence. Optionally, a target substrate includes a peptide containing the cleavage sequence and any other amino acids. A full-length protein, allelic variant, isoform, or any portion thereof, containing a cleavage sequence recognized by a protease, is a target substrate for that protease. For example, for purposes herein in which complement inactivation is intended, a target substrate is complement protein C3, or any portion or fragment thereof containing a cleavage sequence recognized by a u-PA polypeptide. Such target substrates can be purified proteins, or can be present in a mixture, such as a mixture in vitro or a mixture in vivo. Mixtures can include, for example, blood or serum, or other tissue fluids. Additionally, a target substrate includes a peptide or protein containing an additional moiety that does not affect cleavage of the substrate by a protease. For example, a target substrate can include a four amino acid peptide or a full-length protein chemically linked to a fluorogenic moiety. The proteases can be modified to exhibit greater substrate specificity for a target substrate.

[0182] As used herein, “u-PA” or “uPA” or “u-PA polypeptide” refers to any u-PA polypeptide including, but not limited to, a recombinantly produced polypeptide, a synthetically produced polypeptide and a u-PA polypeptide extracted or isolated from cells or tissues including, but not limited to, liver and blood. Alternative names that are used interchangeably for u-PA include urokinase and urinary plasminogen activator and urokinase plasminogen activator and urinary-type plasminogen activator and urokinase-type plasminogen activator. u-PA includes related polypeptides from different species including, but not limited to animals of human and non-human origin. Human u-PA includes u-PA, allelic variants, isoforms, synthetic molecules from nucleic acids, protein isolated from human tissue and cells, and modified forms thereof. Exemplary unmodified human u-PA polypeptides include, but are not limited to, unmodified and wild-type native mature u-PA polypeptides (SEQ ID NO:3), the unmodified and wild-type precursor u-PA polypeptide that includes a propeptide and/or signal peptides (such as the u-PA polypeptide set forth in SEQ ID NO:1) and the protease domain (such as the u-PA protease domain set forth in SEQ ID NO: 2). One of skill in the art would recognize that the referenced positions of the mature u-PA polypeptide (SEQ ID NO:3) differ by 20 amino acid residues when compared to the precursor u-PA polypeptide (SEQ ID NO:1), which is the u-PA polypeptide containing the signal peptide sequence. Thus, the first amino acid residue of SEQ ID NO:3 “corresponds to” the twenty-first (21st) amino acid residue of SEQ ID NO:1.

[0183] Recitation of “u-PA” encompasses the activated or two-chain form of the u-PA polypeptide containing the N-terminal A chain (amino acids 1-158 of SEQ ID NO:3) and the C-terminal B chain (amino acids 159-411 of SEQ ID NO:3) linked by a disulfide bond between residues 148C and 279C (corresponding to the mature u-PA polypeptide set forth in SEQ ID NO:3). The two-chain form, or high molecular weight (HMW) u-PA, is formed from a mature u-PA polypeptide (e.g., that set forth in SEQ ID NO:3) by proteolytic cleavage after amino acid residue Lys158 before residue Ile159. Proteolytic cleavage can be carried out, for example, by plasmin, kallikrein, cathepsin B, matriptase and nerve growth factor-γ (gamma). The u-PA polypeptides provided herein can be further modified, such as by chemical modification or post-translational modification. Such modifications include, but are not limited to, glycosylation, pegylation, albumination, farnysylation, carboxylation, hydroxylation, phosphorylation, and other polypeptide modifications known in the art.

[0184] u-PA includes u-PA from any species, including human and non-human species. u-PA polypeptides of non-human origin include, but are not limited to, murine, canine, leporine, avian, bovine, ovine, porcine and other primate u-PA polypeptides. Exemplary u-PA polypeptides of non-human origin include, for example, mouse (Mus musculus, SEQ ID NO:52), rat (Rattus norvegicus, SEQ ID NO:53), cow (Bos taurus, SEQ ID NO:54), pig (Sus scrofa, SEQ ID NO:55), rabbit (Oryctolagus cuniculus, SEQ ID NO:56), chicken (Gallus gallus, SEQ ID NO:57), yellow baboon (Papio cynocephalus, SEQ ID NO:58), Sumatran orangutan (Pongo abelii, SEQ ID NO:59), dog (Canis lupus, SEQ ID NO:60), sheep (Ovis aries, SEQ ID NO:61), marmoset (Callithrix jacchus, SEQ ID NO:62), rhesus monkey (Macaca mulatta, SEQ ID NO:63), northern white-cheeked gibbon (Nomascus leucogenys, SEQ ID NO:64) and chimpanzee (Pan troglodytes, SEQ ID NO:65).

[0185] Reference to u-PA polypeptides also includes precursor polypeptides and mature u-PA polypeptides in single-chain or two-chain forms, truncated forms thereof that have activity, the isolated protease domain and includes allelic variants and species variants, variants encoded by splice variants, and other variants, including polypeptides that have at least or at least about 40%, 45%, 50%, 55%, 65%, 70%, 75%, 80%, 85%, 90%, 95%, 96%, 97%, 98%, 99% or more sequence identity to the precursor polypeptide set forth in SEQ ID NO: 1 or the mature form thereof (SEQ ID NO:3) or the protease domain thereof (SEQ ID NO: 2). u-PA polypeptides include, but are not limited to, tissue-specific isoforms and allelic variants thereof, synthetic molecules prepared by translation of nucleic acids, proteins generated by chemical synthesis, such as syntheses that include ligation of shorter polypeptides, through recombinant methods, proteins isolated from human and non-human tissue and cells, chimeric u-PA polypeptides and modified forms thereof. u-PA polypeptides also include fragments or portions of u-PA that are of sufficient length or include appropriate regions to retain at least one activity (upon activation if needed) of a full-length mature polypeptide. In one example the portion of u-PA is the protease domain, such as, for example, the protease domain set forth in SEQ ID NO: 2 which corresponds to amino acids 179-431 of the u-PA sequence set forth in SEQ ID NO: 1. u-PA polypeptides also include those that contain chemical or posttranslational modifications and those that do not contain chemical or posttranslational modifications. Such modifications include, but are not limited to, pegylation, albumination, glycosylation, farnysylation, carboxylation, hydroxylation, phosphorylation, HESylation (half-life extension by on coupling drug molecules to the biodegradable hydroxyethyl starch (HES)), PASylation (conjugation via genetic fusion or chemical coupling of pharmacologically active compounds, such as proteins, peptides and low molecular weight drugs, with natively disordered biosynthetic polymers made of the small L-amino acids Pro, Ala and/or Ser), and other polypeptide modifications known in the art.

[0186] As used herein, “u-PA protease” or “u-PA protease domain” refers to any u-PA polypeptide including, but not limited to, a recombinantly produced polypeptide, a synthetically produced polypeptide and a u-PA polypeptide extracted or isolated from cells or tissues including, but not limited to, liver and blood. u-PA protease includes related polypeptides from different species including, but not limited to animals of human and non-human origin. A human u-PA protease or u-PA protease domain includes u-PA, allelic variants, isoforms, synthetic molecules from nucleic acids, protein isolated from human tissue and cells, and modified forms thereof. Exemplary reference human u-PA protease domains include, but are not limited to, unmodified and wild-type u-PA protease domain (SEQ ID NO:2) and an alternate protease domain (such as the u-PA protease domain set forth in SEQ ID NO: 5). One of skill in the art would recognize that the referenced positions of the u-PA protease domain (SEQ ID NO:2) differ by 178 amino acid residues when compared to the mature u-PA polypeptide (SEQ ID NO:1), which is the u-PA polypeptide containing the full length WT sequence. Thus, the first amino acid residue of SEQ ID NO:2 “corresponds to” the one hundred seventy-ninth (179th) amino acid residue of SEQ ID NO: 1.

[0187] As used herein, a “modification” is in reference to modification of a sequence of amino acids of a polypeptide or a sequence of nucleotides in a nucleic acid molecule and includes deletions, insertions, and replacements of amino acids or nucleotides, respectively. Methods of modifying a polypeptide are routine to those of skill in the art, such as by using recombinant DNA methodologies. There is a distinction between modifications to the sequence of amino acids of polypeptide and modification of the polypeptide. The former refers to insertions, deletions, and replacements or substitutions of amino acids; the latter to modifications of the polypeptide, such as post-translational modifications, PEGylation, and other such modifications of proteins to alter properties and/or activities.

[0188] As used herein, “substitution” or “replacement” refers to the replacing of one or more nucleotides or amino acids in a native, target, wild-type or other nucleic acid or polypeptide sequence with an alternative nucleotide or amino acid, without changing the length (as described in numbers of residues) of the molecule. Thus, one or more substitutions in a molecule does not change the number of amino acid residues or nucleotides of the molecule. Amino acid replacements compared to a particular polypeptide can be expressed in terms of the number of the amino acid residue along the length of the polypeptide sequence. For example, a modified polypeptide having a modification in the amino acid at the 35^{th} position of the amino acid sequence that is a substitution/replacement of Arginine (Arg; R) with glutamine (Gln; Q) can be expressed as R35Q, Arg35Gln, or 35Q. Simply R35 can be used to indicate that the amino acid at the modified 35^{th} position is an arginine.

[0189] As used herein, a “modified u-PA” or “modified u-PA polypeptide” refers to a u-PA protease that exhibits altered activity, such as altered substrate specificity, compared to the unmodified form. Such proteases include 1, 2, 3, 4, 5, 6, 7, 8, 9, 10, 11, 12, 13, 14, 15, 16, 17, 18, 19, 20, or more modifications (i.e. changes in amino acids) compared to a wild type u-PA such that an activity, such as substrate specificity or selectivity, of the u-PA protease for cleaving complement protein C3 is altered. A modified u-PA can be a full-length u-PA protease, or can be a portion thereof of a full length protease, such as the protease domain of u-PA, as long as the modified u-PA protease contains modifications in regions that alter the activity or substrate specificity of the protease and the protease is proteolytically active. A modified u-PA protease, or a modified u-PA protease domain, also can include other modifications in regions that do not impact on substrate specificity of the protease. Hence, a modified u-PA polypeptide typically has 60%, 70%, 80%, 85%, 90%, 91%, 92%, 93%, 94%, 95%, 96%, 97%, 98%, 99% or more sequence identity to a corresponding sequence of amino acids of a wild type u-PA polypeptide. A modified full-length u-PA polypeptide or a catalytically active portion thereof or a protease domain thereof of a modified u-PA polypeptide can include polypeptides that are fusion proteins as long as the fusion protein possesses the target specificity.

[0190] As used herein, chymotrypsin numbering refers to the amino acid numbering of a mature chymotrypsin polypeptide of SEQ ID NO:76. Alignment of a protease domain of another protease, such as, for example, the protease domain of u-PA, can be made with chymotrypsin. In such an instance, the amino acids of u-PA polypeptide that correspond to amino acids of chymotrypsin are given the numbering of the chymotrypsin amino acids. Corresponding positions can be determined by such alignment by one of skill in the art using manual alignments or by using the numerous alignment programs available (for example, BLASTP). Corresponding positions also can be based on structural alignments, for example by using computer simulated alignments of protein structure. Recitation that amino acids of a polypeptide correspond to amino acids in a disclosed sequence refers to amino acids identified upon alignment of the polypeptide with the disclosed sequence to maximize identity or homology (where conserved amino acids are aligned) using a standard alignment algorithm, such as the GAP algorithm. The corresponding chymotrypsin numbers of amino acid positions 159-411 of the u-PA polypeptide set forth in SEQ ID NO:3 are provided in Table 1. The amino acid positions relative to the sequence set forth in SEQ ID NO:3 are in normal font, the amino acid residues at those positions are in bold, and the corresponding chymotrypsin numbers are in italics. For example, upon alignment of the serine protease domain of u-PA (SEQ ID NO:2) with mature chymotrypsin, the isoleucine (I) at position 159 in u-PA is given the chymotrypsin numbering of 116. Subsequent amino acids are numbered accordingly. In one example, a phenylalanine (F) at amino acid position 173 of mature u-PA (SEQ ID NO:3) corresponds to amino acid position F30 based on chymotrypsin numbering. Where a residue exists in a protease, but is not present in chymotrypsin, the amino acid residue is given a letter notation. For example, residues in chymotrypsin that are part of a loop with amino acid 60 based on chymotrypsin numbering, but are inserted in the u-PA sequence compared to chymotrypsin, are referred to for example as D60a, Y60b or P60c. These residues correspond to D208, Y209 and P210, respectively, by numbering relative to the mature u-PA sequence set forth in SEQ ID NO:3.

TABLE 1
Chymotrypsin numbering of u-PA

| | | | | | | | | | | | | | | |
|---|---|---|---|---|---|---|---|---|---|---|---|---|---|---|
| 159 | 160 | 161 | 162 | 163 | 164 | 165 | 166 | 167 | 168 | 169 | 170 | 171 | 172 | 173 |
| I | I | G | G | E | F | T | T | I | E | N | Q | P | W | F |
| 16 | 17 | 18 | 19 | 20 | 21 | 22 | 23 | 24 | 25 | 26 | 27 | 28 | 29 | 30 |
| 174 | 175 | 176 | 177 | 178 | 179 | 180 | 181 | 182 | 183 | 184 | 185 | 186 | 187 | 188 |
| A | A | I | Y | R | R | H | R | G | G | S | V | T | Y | V |
| 31 | 32 | 33 | 34 | 35 | 36 | 37 | 37A | 37B | 37C | 37D | 38 | 39 | 40 | 41 |
| 189 | 190 | 191 | 192 | 193 | 194 | 195 | 196 | 197 | 198 | 199 | 200 | 201 | 202 | 203 |
| C | G | G | S | L | I | S | P | C | W | V | I | S | A | T |
| 42 | 43 | 44 | 45 | 46 | 47 | 48 | 49 | 50 | 51 | 52 | 53 | 54 | 55 | 56 |
| 204 | 205 | 206 | 207 | 208 | 209 | 210 | 211 | 212 | 213 | 214 | 215 | 216 | 217 | 218 |
| H | C | F | I | D | Y | P | K | K | E | D | Y | I | V | Y |
| 57 | 58 | 59 | 60 | 60A | 60B | 60C | 61 | 62 | 62A | 63 | 64 | 65 | 66 | 67 |
| 219 | 220 | 221 | 222 | 223 | 224 | 225 | 226 | 227 | 228 | 229 | 230 | 231 | 232 | 233 |
| L | G | R | S | R | L | N | S | N | T | Q | G | E | M | K |
| 68 | 69 | 70 | 71 | 72 | 73 | 74 | 75 | 76 | 77 | 78 | 79 | 80 | 81 | 82 |
| 234 | 235 | 236 | 237 | 238 | 239 | 240 | 241 | 242 | 243 | 244 | 245 | 246 | 247 | 248 |
| F | E | V | E | N | L | I | L | H | K | D | Y | S | A | D |
| 83 | 84 | 85 | 86 | 87 | 88 | 89 | 90 | 91 | 92 | 93 | 94 | 95 | 96 | 97 |
| 249 | 250 | 251 | 252 | 253 | 254 | 255 | 256 | 257 | 258 | 259 | 260 | 261 | 262 | 263 |
| T | L | A | H | H | N | D | I | A | L | L | K | I | R | S |
| 97A | 97B | 98 | 99 | 100 | 101 | 102 | 103 | 104 | 105 | 106 | 107 | 108 | 109 | 110 |
| 264 | 265 | 266 | 267 | 268 | 269 | 270 | 271 | 272 | 273 | 274 | 275 | 276 | 277 | 278 |
| K | E | G | R | C | A | Q | P | S | R | T | I | Q | T | I |
| 110A | 110B | 110C | 110D | 111 | 112 | 113 | 114 | 115 | 116 | 117 | 118 | 119 | 120 | 121 |
| 279 | 280 | 281 | 282 | 283 | 284 | 285 | 286 | 287 | 288 | 289 | 290 | 291 | 292 | 293 |
| C | L | P | S | M | Y | N | D | P | Q | F | G | T | S | C |
| 122 | 123 | 124 | 125 | 126 | 127 | 128 | 129 | 130 | 131 | 132 | 133 | 134 | 135 | 136 |
| 294 | 295 | 296 | 297 | 298 | 299 | 300 | 301 | 302 | 303 | 304 | 305 | 306 | 307 | 308 |
| E | I | T | G | F | G | K | E | N | S | T | D | Y | L | Y |
| 137 | 138 | 139 | 140 | 141 | 142 | 143 | 144 | 145 | 146 | 147 | 148 | 149 | 150 | 151 |
| 309 | 310 | 311 | 312 | 313 | 314 | 315 | 316 | 317 | 318 | 319 | 320 | 321 | 322 | 323 |
| P | E | Q | L | K | M | T | V | V | K | L | I | S | H | R |
| 152 | 153 | 154 | 155 | 156 | 157 | 158 | 159 | 160 | 161 | 162 | 163 | 164 | 165 | 166 |
| 324 | 325 | 326 | 327 | 328 | 329 | 330 | 331 | 332 | 333 | 334 | 335 | 336 | 337 | 338 |
| E | C | Q | Q | P | H | Y | Y | G | S | E | V | T | T | K |
| 167 | 168 | 169 | 170 | 170A | 1708 | 171 | 172 | 173 | 174 | 175 | 176 | 177 | 178 | 179 |
| 339 | 340 | 341 | 342 | 343 | 344 | 345 | 346 | 347 | 348 | 349 | 350 | 351 | 352 | 353 |
| M | L | C | A | A | D | P | Q | W | K | T | D | S | C | Q |
| 180 | 181 | 182 | 183 | 184 | 185 | 185A | 1858 | 186 | 187 | 188 | 189 | 190 | 191 | 192 |
| 354 | 355 | 356 | 357 | 358 | 359 | 360 | 361 | 362 | 363 | 364 | 365 | 366 | 367 | 368 |
| G | D | S | G | G | P | L | V | CS | L | Q | G | R | M | |
| 193 | 194 | 195 | 196 | 197 | 198 | 199 | 200 | 201 | 202 | 203 | 204 | 205 | 206 | 207 |
| 369 | 370 | 371 | 372 | 373 | 374 | 375 | 376 | 377 | 378 | 379 | 380 | 381 | 382 | 383 |
| T | L | T | G | I | V | S | W | G | R | G | C | A | L | K |
| 208 | 209 | 210 | 211 | 212 | 213 | 214 | 215 | 216 | 217 | 218 | 220 | 221 | 222 | 223 |
| 384 | 385 | 386 | 387 | 388 | 389 | 390 | 391 | 392 | 393 | 394 | 395 | 396 | 397 | 398 |
| D | K | P | G | V | Y | T | R | V | S | H | F | L | P | W |
| 223A | 224 | 225 | 226 | 227 | 228 | 229 | 230 | 231 | 232 | 233 | 234 | 235 | 236 | 237 |
| 399 | 400 | 401 | 402 | 403 | 404 | 405 | 406 | 407 | 408 | 409 | 410 | 411 | | |
| I | R | S | H | T | K | E | E | N | G | L | A | L | | |
| 238 | 239 | 240 | 241 | 242 | 243 | 244 | 245 | 246 | 247 | 248 | 249 | 250 | | |

[0191] As used herein, k_{cat} measures the catalytic activity of an enzyme; the units of k_{cat} are seconds⁻¹. The reciprocal of k_{cat} is the time required by an enzyme molecule to “turn over” one substrate molecule; k_{cat} measures the number of substrate molecules turned over per enzyme molecule per second. k_{cat} is sometimes called the turnover number. In enzymology, k_{cat} (also referred to as turnover number) is the maximum number of chemical conversions of substrate molecules per second that a single catalytic site executes for a given enzyme. It is the maximum rate of reaction (Vₘₐₓ) when all the enzyme catalytic sites are saturated with substrate.

[0192] As used herein, specificity for a target substrate refers to a preference for cleavage of a target substrate by a protease compared to another substrate, referred to as a non-target substrate. Specificity is reflected in the specificity constant (k_{cat}/Kₘ), which is a measure of the affinity of a protease for its substrate and the efficiency of the enzyme. k_{cat}/Kₘ is a measure of enzyme efficiency; a large value of k_{cat} (rapid turnover) or a small value of Kₘ (high affinity for substrate) makes k_{cat}/Kₘ large.

[0193] As used herein, a specificity constant for cleavage is (k_{cat}/Kₘ), where Kₘ is the Michaelis-Menton constant ([S] at one half Vₘₐₓ) and k_{cat} is the Vₘₐₓ/[E_{T}], where E_{T} is the final enzyme concentration. The parameters k_{cat}, Kₘ and k_{cat}/Kₘ can be calculated by graphing the inverse of the substrate concentration versus the inverse of the velocity of substrate cleavage, and fitting to the Lineweaver-Burk equation (1/velocity=(Kₘ/Vₘₐₓ)(1/[S])+1/Vₘₐₓ; where Vₘₐₓ=[E_{T}]k_{cat}). Any method to determine the rate of increase of cleavage over time in the presence of various concentrations of substrate can be used to calculate the specificity constant. For example, a substrate is linked to a fluorogenic moiety, which is released upon cleavage by a protease. By determining the rate of cleavage at different enzyme concentrations, k_{cat} can be determined for a particular protease. The specificity constant can be used to determine the preference of a protease for one target substrate over another substrate.

[0194] As used herein, substrate specificity refers to the preference of a protease for one target substrate over another. Substrate specificity can be measured as a ratio of specificity constants.

[0195] As used herein, a substrate specificity ratio is the ratio of specificity constants and can be used to compare specificities of two or more proteases or a protease for two or more substrates. For example, substrate specificity of a protease for competing substrates or of competing proteases for a substrate can be compared by comparing k_{cat}/Kₘ. For example, a protease that has a specificity constant of 2×10⁶ M⁻¹ sec⁻¹ for a target substrate and 2×10⁴ M⁻¹ sec⁻¹ for a non-target substrate is more specific for the target substrate. Using the specificity constants from above, the protease has a substrate specificity ratio of 100 for the target substrate.

[0196] As used herein, preference or substrate specificity for a target substrate can be expressed as a substrate specificity ratio. The particular value of the ratio that reflects a preference is a function of the substrates and proteases at issue. A substrate specificity ratio that is greater than 1 signifies a preference for a target substrate and a substrate specificity less than 1 signifies a preference for a non-target substrate. Generally, a ratio of at least or about 1 reflects a sufficient difference for a protease to be considered a candidate therapeutic.

[0197] As used herein, altered specificity refers to a change in substrate specificity of a modified protease compared to a starting wild type protease. Generally, the change in specificity is a reflection of the change in preference of a modified protease for a target substrate compared to a wild type substrate of the protease (herein referred to as a non-target substrate). Typically, modified u-PA proteases provided herein exhibit increased substrate specificity for complement protein C3 compared to the substrate specificity of the wild type u-PA protease. For example, a modified protease that has a substrate specificity ratio of 100 for a target substrate versus a non-target substrate exhibits a 10-fold increased specificity compared to a scaffold protease with a substrate specificity ratio of 10. In another example, a modified protease that has a substrate specificity ratio of 1 compared to a ratio of 0.1, exhibits a 10-fold increase in substrate specificity. To exhibit increased specificity compared to a scaffold protease, a modified protease has a 1.5-fold, 2-fold, 5-fold, 10-fold, 50-fold, 100-fold, 200-fold, 300-fold, 400-fold, 500-fold or more greater substrate specificity for any one of more of the complement proteins.

[0198] As used herein, “selectivity” can be used interchangeably with specificity when referring to the ability of a protease to choose and cleave one target substrate from among a mixture of competing substrates. Increased selectivity of a protease for a target substrate compared to any other one or more target substrates can be determined, for example, by comparing the specificity constants of cleavage of the target substrates by a protease. For example, if a protease has a specificity constant of cleavage of 2×10⁶ M⁻¹ sec⁻¹ for a target substrate and 2×10⁴ M⁻¹ sec⁻¹ for any other one of more substrates, the protease is more selective for the target substrate.

[0199] As used herein, an “activity” or a “functional activity” of a polypeptide, such as a protease, refers to any activity exhibited by the polypeptide. Such activities can be empirically determined. Exemplary activities include, but are not limited to, ability to interact with a biomolecule, for example, through substrate-binding, DNA binding, or dimerization, enzymatic activity, for example, kinase activity or proteolytic activity. For a protease (including protease fragments), activities include, but are not limited to, the ability to specifically bind a particular substrate, affinity and/or specificity of substrate-binding (e.g., high or low affinity and/or specificity), effector functions, such as the ability to promote substrate (e.g. protein, i.e. C3) inhibition, neutralization, cleavage or clearance, and in vivo activities, such as the ability to promote protein cleavage or clearance. Activity can be assessed in vitro or in vivo using recognized assays, such as ELISA, flow cytometry, surface plasmon resonance or equivalent assays to measure on- or off-rate, immunohistochemistry and immunofluorescence histology and microscopy, cell-based assays, and binding assays. For example, for a protease, e.g. a modified u-PA protease, activities can be assessed by measuring substrate protein cleavage, turnover, residual activity, stability and/or levels in vitro and/or in vivo. The results of such in vitro assays that indicate that a polypeptide exhibits an activity can be correlated to activity of the polypeptide in vivo, in which in vivo activity can be referred to as therapeutic activity, or biological activity. Activity of a modified polypeptide can be any level of percentage of activity of the unmodified polypeptide, including, but not limited to, at or about 1% of the activity, 2%, 3%, 4%, 5%, 10%, 20%, 30%, 40%, 50%, 60%, 70%, 80%, 90%, 91%, 92%, 93%, 94%, 95%, 96%, 97%, 98%, 99%, 100%, 200%, 300%, 400%, 500%, or more of activity compared to the unmodified polypeptide. Assays to determine functionality or activity of modified (or variant) proteases are well-known in the art.

[0200] Functional activities include, but are not limited to, biological activity, catalytic or enzymatic activity, antigenicity (ability to bind to or compete with a polypeptide for binding to an anti-polypeptide antibody), immunogenicity, ability to form multimers, and the ability to specifically bind to a receptor or ligand for the polypeptide.

[0201] As used herein, a functional activity with reference to a complement protein refers to a complement-mediated function including, but not limited to, anaphylaxis, opsonization, chemotaxis, or cell lysis. Exemplary of assays for testing activities of complement activity include hemolysis of red blood cells, and detection of complement effector molecules such as by ELISA or SDS-PAGE.

[0202] As used herein, catalytic activity or cleavage activity refers to the activity of a protease as assessed in in vitro proteolytic assays that detect proteolysis of a selected substrate. Cleavage activity can be measured by assessing catalytic efficiency of a protease.

[0203] As used herein, activity towards a target substrate refers to cleavage activity and/or functional activity, or other measurement that reflects the activity of a protease on or towards a target substrate. A functional activity of a complement protein target substrate by a protease can be measured by assessing an IC50 in a complement assay such as red blood cell lysis, or other such assays known by one of skill in the art or provided herein to assess complement activity. Cleavage activity can be measured by assessing catalytic efficiency of a protease. For purposes herein, an activity is increased if a protease exhibits greater proteolysis or cleavage of a target substrate and/or modulates (i.e. activates or inhibits) a functional activity of a complement protein as compared to in the absence of the protease.

[0204] As used herein, “increased activity” with reference to a modified u-PA polypeptide means that, when tested under the same conditions, the modified u-PA polypeptide exhibits greater activity compared to an unmodified u-PA polypeptide not containing the amino acid replacement(s). For example, a modified u-PA polypeptide exhibits at least or about at least 110%, 120%, 130%, 140%, 150%, 160%, 170%, 180%, 190%, 200%, 250%, 300%, 400%, 500%, 600%, 700%, 800%, 900%, 1000% or more of the activity of the unmodified or reference u-PA polypeptide.

[0205] As used herein, the term “the same,” when used in reference to antibody binding affinity, means that the EC₅₀, association constant (Ka) or dissociation constant (Kd) is within about 1 to 100 fold or 1 to 10 fold of that of the reference antibody (1-100 fold greater affinity or 1-100 fold less affinity, or any numerical value or range or value within such ranges, than the reference antibody).

[0206] As used herein, “binding activity” refers to characteristics of a molecule, e.g., a polypeptide, relating to whether or not, and how, it binds one or more binding partners. Binding activities include the ability to bind the binding partner(s), the affinity with which it binds to the binding partner (e.g., high affinity), the strength of the bond with the binding partner and/or specificity for binding with the binding partner.

[0207] As used herein, EC₅₀, also called the apparent Kd, is the concentration (e.g., nM) of protease, where 50% of the maximal activity is observed on a fixed amount of substrate (e.g., the concentration of modified u-PA polypeptide required to cleave through 50% of the available hC3). Typically, EC₅₀ values are determined from sigmoidal dose-response curves, where the EC₅₀ is the concentration at the inflection point. A high protease affinity for its substrate correlates with a low EC₅₀ value and a low affinity corresponds to a high EC₅₀ value. Affinity constants can be determined by standard kinetic methodology for protease reactions, for example, immunoassays, such as ELISA, followed by curve-fitting analysis.

[0208] As used herein, “affinity constant” refers to an association constant (Ka) used to measure the affinity or molecular binding strength between a protease and a substrate. The higher the affinity constant the greater the affinity of the protease for the substrate. Affinity constants are expressed in units of reciprocal molarity (i.e., M⁻¹ and can be calculated from the rate constant for the association-dissociation reaction as measured by standard kinetic methodology for protease-substrate reactions (e.g., immunoassays, surface plasmon resonance, or other kinetic interaction assays known in the art). The binding affinity of a protease also can be expressed as a dissociation constant, or Kd. The dissociation constant is the reciprocal of the association constant, Kd=1/Ka. Hence, an affinity constant also can be represented by the Kd. Affinity constants can be determined by standard kinetic methodology for protease reactions, for example, immunoassays, surface plasmon resonance (SPR) (Rich and Myszka (2000) Curr. Opin. Biotechnol 11:54; Englebienne (1998) Analyst. 123:1599), isothermal titration calorimetry (ITC) or other kinetic interaction assays known in the art (see, e.g., Paul, ed., Fundamental Immunology, 2nd ed., Raven Press, New York, pages 332-336 (1989)). Instrumentation and methods for real time detection and monitoring of binding rates are known and are commercially available (e.g., BIAcore 2000, BIAcore AB, Uppsala, Sweden and GE Healthcare Life Sciences; Malmqvist (2000) Biochem. Soc. Trans. 27:335).

[0209] Methods for calculating affinity are well-known, such as methods for determining EC₅₀ values or methods for determining association/dissociation constants, including those exemplified herein. For example, with respect to EC₅₀, high binding affinity means that the protease specifically binds to a target protein with an EC₅₀ that is less than about 10 ng/mL, 9 ng/mL, 8 ng/mL, 7 ng/mL, 6 ng/mL, 5 ng/mL, 3 ng/mL, 2 ng/mL, 1 ng/mL or less. High binding affinity also can be characterized by an equilibrium dissociation constant (Kd) of 10⁻⁶ M or lower, such as 10⁻⁷ M, 10⁻⁸ M, 10⁻¹⁰ M, 10⁻¹¹ M or 10⁻¹² M or lower. In terms of equilibrium association constant (Ka), high binding affinity is generally associated with Ka values of greater than or equal to about 10⁶ M⁻¹, greater than or equal to about 10⁷ M⁻¹, greater than or equal to about 10⁸ M⁻¹, or greater than or equal to about 10⁹ M⁻¹, 10¹⁰ M⁻¹, 10¹¹ M⁻¹ or 10¹² M⁻¹. Affinity can be estimated empirically or affinities can be determined comparatively, e.g., by comparing the affinity of two or more antibodies for a particular antigen, for example, by calculating pairwise ratios of the affinities of the antibodies tested. For example, such affinities can be readily determined using conventional techniques, such as by ELISA; equilibrium dialysis; surface plasmon resonance; by radioimmunoassay using radiolabeled target antigen; or by another method known to the skilled artisan. The affinity data can be analyzed, for example, by the method of Scatchard et al., Ann N. Y. Acad. Sci., 51:660 (1949) or by curve fitting analysis, for example, using a 4 Parameter Logistic nonlinear regression model using the equation: y=((A−D)/(1+((x/C)\hat{ }B)))+D, where A is the minimum asymptote, B is the slope factor, C is the inflection point (EC₅₀), and D is the maximum asymptote.

[0210] As used herein, “ED₅₀” is the dose (e.g., mg/kg or nM) of a protease (e.g., a modified u-PA) that produces a specified result (e.g., cleavage of the complement protein C3) in 50% of the total population (e.g., total amount of C3 present in the sample).

[0211] As used herein, the term “surface plasmon resonance” refers to an optical phenomenon that allows for the analysis of real-time interactions by detection of alterations in protein concentrations within a biosensor matrix, for example, using the BIAcore system (GE Healthcare Life Sciences).

[0212] As used herein, a human protein is one encoded by a nucleic acid molecule, such as DNA, present in the genome of a human, including all allelic variants and conservative variations thereof. A variant or modification of a protein is a human protein if the modification is based on the wild type or prominent sequence of a human protein.

[0213] As used herein, the residues of naturally occurring a-amino acids are the residues of those 20 α-amino acids found in nature which are incorporated into protein by the specific recognition of the charged tRNA molecule with its cognate mRNA codon in humans.

[0214] As used herein, non-naturally occurring amino acids refer to amino acids that are not genetically encoded.

[0215] As used herein, “nucleic acid” refers to at least two linked nucleotides or nucleotide derivatives, including a deoxyribonucleic acid (DNA) and a ribonucleic acid (RNA) and analogs thereof, joined together, typically by phosphodiester linkages. Also included in the term “nucleic acid” are analogs of nucleic acids such as peptide nucleic acid (PNA), phosphorothioate DNA, and other such analogs and derivatives or combinations thereof. Nucleic acids also include DNA and RNA derivatives containing, for example, a nucleotide analog or a “backbone” bond other than a phosphodiester bond, for example, a phosphotriester bond, a phosphoramidate bond, a phosphorothioate bond, a thioester bond, or a peptide bond (peptide nucleic acid). The term also includes, as equivalents, derivatives, variants and analogs of either RNA or DNA made from nucleotide analogs, single (sense or antisense) and double-stranded nucleic acids. Deoxyribonucleotides include deoxyadenosine, deoxycytidine, deoxyguanosine and deoxythymidine. For RNA, the uracil base is uridine. Nucleic acids can be single or double-stranded. When referring to probes or primers, which are optionally labeled, such as with a detectable label, such as a fluorescent or radiolabel, single-stranded molecules are contemplated. Such molecules are typically of a length such that their target is statistically unique or of low copy number (typically less than 5, generally less than 3) for probing or priming a library. Generally a probe or primer contains at least 14, 16 or 30 contiguous nucleotides of sequence complementary to or identical to a gene of interest. Probes and primers can be 10, 20, 30, 50, 100 or more nucleotides long.

[0216] As used herein, an “isolated nucleic acid molecule” is one which is separated from other nucleic acid molecules which are present in the natural source of the nucleic acid molecule. An “isolated” nucleic acid molecule, such as a cDNA molecule, can be substantially free of other cellular material, or culture medium when produced by recombinant techniques, or substantially free of chemical precursors or other chemicals when chemically synthesized. Exemplary isolated nucleic acid molecules provided herein include isolated nucleic acid molecules encoding a u-PA protease provided.

[0217] As used herein, “synthetic,” with reference to, for example, a synthetic nucleic acid molecule or a synthetic gene or a synthetic peptide refers to a nucleic acid molecule or polypeptide molecule that is produced by recombinant methods and/or by chemical synthesis methods.

[0218] As used herein, “polypeptide” refers to two or more amino acids covalently joined. The terms “polypeptide” and “protein” are used interchangeably herein.

[0219] As used herein, a “peptide” refers to a polypeptide that is from 2 to about or 40 amino acids in length.

[0220] As used herein, the amino acids which occur in the various sequences of amino acids provided herein are identified according to their known, three-letter or one-letter abbreviations (Table 2). The nucleotides which occur in the various nucleic acid fragments are designated with the standard single-letter designations used routinely in the art.

[0221] As used herein, an “amino acid” is an organic compound containing an amino group and a carboxylic acid group. A polypeptide contains two or more amino acids. For purposes herein, amino acids include the twenty naturally-occurring amino acids (Table 2), non-natural amino acids and amino acid analogs (i.e., amino acids where the α-carbon has a side chain). As used herein, the amino acids, which occur in the various amino acid sequences of polypeptides appearing herein, are identified according to their well-known, three-letter or one-letter abbreviations (see Table 2). The nucleotides, which occur in the various nucleic acid molecules and fragments, are designated with the standard single-letter designations used routinely in the art.

[0222] As used herein, “amino acid residue” refers to an amino acid formed upon chemical digestion (hydrolysis) of a polypeptide at its peptide linkages. The amino acid residues described herein are presumed to be in the “L” isomeric form. Residues in the “D” isomeric form, which are so designated, can be substituted for any L-amino acid residue as long as the desired functional property is retained by the polypeptide. NH₂ refers to the free amino group present at the amino terminus of a polypeptide. COOH refers to the free carboxy group present at the carboxyl terminus of a polypeptide. In keeping with standard polypeptide nomenclature described in J. Biol. Chem., 243: 3557-3559 (1968), and adopted in 37 C.F.R. §§ 1.821-1.822, abbreviations for amino acid residues are shown in Table 2:

TABLE 2
Table of Correspondence

| SYMBOL | | |
|---|---|---|
| 1-Letter | 3-Letter | AMINO ACID |
| Y | Tyr | Tyrosine |
| G | Gly | Glycine |
| F | Phe | Phenylalanine |
| M | Met | Methionine |
| A | Ala | Alanine |
| S | Ser | Serine |
| I | Ile | Isoleucine |
| L | Leu | Leucine |
| T | Thr | Threonine |
| V | Val | Valine |
| P | Pro | Proline |
| K | Lys | Lysine |
| H | His | Histidine |
| Q | Gln | Glutamine |
| E | Glu | Glutamic acid |
| Z | Glx | Glu and/or Gln |
| W | Trp | Tryptophan |
| R | Arg | Arginine |
| D | Asp | Aspartic acid |
| N | Asn | Asparagine |
| B | Asx | Asn and/or Asp |
| C | Cys | Cysteine |
| X | Xaa | Unknown or other |

[0223] All sequences of amino acid residues represented herein by a formula have a left to right orientation in the conventional direction of amino-terminus to carboxyl-terminus. The phrase “amino acid residue” includes the amino acids listed in the Table of Correspondence (Table 2), modified, non-natural and unusual amino acids. Furthermore, a dash at the beginning or end of an amino acid residue sequence indicates a peptide bond to a further sequence of one or more amino acid residues or to an amino-terminal group such as NH₂ or to a carboxyl-terminal group such as COOH.

[0224] As used herein, “naturally occurring amino acids” refer to the 20 L-amino acids that occur in polypeptides. As used herein, the residues of naturally occurring α-amino acids are the residues of those 20 α-amino acids found in nature which are incorporated into protein by the specific recognition of the charged tRNA molecule with its cognate mRNA codon in humans.

[0225] As used herein, “non-natural amino acid” refers to an organic compound that has a structure similar to a natural amino acid but has been modified structurally to mimic the structure and reactivity of a natural amino acid. Non-naturally occurring amino acids thus include, for example, amino acids or analogs of amino acids other than the 20 naturally occurring amino acids and include, but are not limited to, the D-stereoisomers of amino acids. Exemplary non-natural amino acids are known to those of skill in the art, and include, but are not limited to, para-acetyl Phenylalanine, para-azido Phenylalanine, 2-Aminoadipic acid (Aad), 3-Aminoadipic acid (bAad), β-alanine/β-Amino-propionic acid (Bala), 2-Aminobutyric acid (Abu), 4-Aminobutyric acid/piperidinic acid (4Abu), 6-Aminocaproic acid (Acp), 2-Aminoheptanoic acid (Ahe), 2-Aminoisobutyric acid (Aib), 3-Aminoisobutyric acid (Baib), 2-Aminopimelic acid (Apm), 2,4-Diaminobutyric acid (Dbu), Desmosine (Des), 2,2′-Diaminopimelic acid (Dpm), 2,3-Diaminopropionic acid (Dpr), N-Ethylglycine (EtGly), N-Ethylasparagine (EtAsn), Hydroxylysine (Hyl), allo-Hydroxylysine (Ahyl), 3-Hydroxyproline (3Hyp), 4-Hydroxyproline (4Hyp), Isodesmosine (Ide), allo-Isoleucine (Aile), N-Methylglycine, sarcosine (MeGly), N-Methylisoleucine (Melle), 6-N-Methyllysine (MeLys), N-Methylvaline (MeVal), Norvaline (Nva), Norleucine (Nle), and Ornithine (Orn). Exemplary non-natural amino acids are described herein and are known to those of skill in the art.

[0226] As used herein, an isokinetic mixture is one in which the molar ratios of amino acids has been adjusted based on their reported reaction rates (see, e.g., Ostresh et al. (1994) Biopolymers 34:1681).

[0227] As used herein, a DNA construct is a single or double stranded, linear or circular DNA molecule that contains segments of DNA combined and juxtaposed in a manner not found in nature. DNA constructs exist as a result of human manipulation, and include clones and other copies of manipulated molecules.

[0228] As used herein, a DNA segment is a portion of a larger DNA molecule having specified attributes. For example, a DNA segment encoding a specified polypeptide is a portion of a longer DNA molecule, such as a plasmid or plasmid fragment, which, when read from the 5′ to 3′ direction, encodes the sequence of amino acids of the specified polypeptide.

[0229] As used herein, the term ortholog means a polypeptide or protein obtained from one species that is the functional counterpart of a polypeptide or protein from a different species. Sequence differences among orthologs are the result of speciation.

[0230] As used herein, the term polynucleotide means a single- or double-stranded polymer of deoxyribonucleotides or ribonucleotide bases read from the 5′ to the 3′ end. Polynucleotides include RNA and DNA, and can be isolated from natural sources, synthesized in vitro, or prepared from a combination of natural and synthetic molecules. The length of a polynucleotide molecule is given herein in terms of nucleotides (abbreviated “nt”) or base pairs (abbreviated “bp”). The term nucleotides is used for single- and double-stranded molecules where the context permits. When the term is applied to double-stranded molecules it is used to denote overall length and is understood to be equivalent to the term base pairs. Those skilled in the art understand that the two strands of a double-stranded polynucleotide can differ slightly in length and that the ends thereof can be staggered; thus all nucleotides within a double-stranded polynucleotide molecule cannot be paired. Such unpaired ends generally do not exceed 20 nucleotides in length.

[0231] As used herein, alignment of a sequence refers to the use of homology to align two or more sequences of nucleotides or amino acids. Typically, two or more sequences that are related by 50% or more identity are aligned. An aligned set of sequences refers to 2 or more sequences that are aligned at corresponding positions and can include aligning sequences derived from RNAs, such as ESTs and other cDNAs, aligned with genomic DNA sequences. Related or variant polypeptides or nucleic acid molecules can be aligned by any method known to those of skill in the art. Such methods typically maximize matches, and include methods, such as using manual alignments and by using the numerous alignment programs available (e.g., BLASTP) and others, known to those of skill in the art. By aligning the sequences of polypeptides or nucleic acids, one skilled in the art can identify analogous portions or positions, using conserved and identical amino acid residues as guides. Further, one skilled in the art also can employ conserved amino acid or nucleotide residues as guides to find corresponding amino acid or nucleotide residues between and among human and non-human sequences. Corresponding positions also can be based on structural alignments, for example by using computer simulated alignments of protein structure. In other instances, corresponding regions can be identified. One skilled in the art also can employ conserved amino acid residues as guides to find corresponding amino acid residues between and among human and non-human sequences.

[0232] As used herein, “sequence identity” refers to the number of identical or similar amino acids or nucleotide bases in a comparison between a test and a reference polypeptide or polynucleotide. Sequence identity can be determined by sequence alignment of nucleic acid or protein sequences to identify regions of similarity or identity. For purposes herein, sequence identity is generally determined by alignment to identify identical residues. The alignment can be local or global. Matches, mismatches and gaps can be identified between compared sequences. Gaps are null amino acids or nucleotides inserted between the residues of aligned sequences so that identical or similar characters are aligned. Generally, there can be internal and terminal gaps. Sequence identity can be determined by taking into account gaps as the number of identical residues/length of the shortest sequence×100. When using gap penalties, sequence identity can be determined with no penalty for end gaps (e.g terminal gaps are not penalized). Alternatively, sequence identity can be determined without taking into account gaps as the number of identical positions/length of the total aligned sequence×100.

[0233] As used herein, “at a position corresponding to,” or recitation that nucleotides or amino acid positions “correspond to” nucleotides or amino acid positions in a disclosed sequence, such as set forth in the Sequence listing, refers to nucleotides or amino acid positions identified upon alignment with the disclosed sequence to maximize identity using a standard alignment algorithm, such as the GAP algorithm. For purposes herein, alignment of a u-PA sequence is to the amino acid sequence of the protease domain of human u-PA set forth in SEQ ID NO: 2 or 5, particularly a reference human u-PA of SEQ ID NO:5. By aligning the sequences, one skilled in the art can identify corresponding residues, for example, using conserved and identical amino acid residues as guides. In general, to identify corresponding positions, the sequences of amino acids are aligned so that the highest order match is obtained (see, e.g.: Computational Molecular Biology, Lesk, A. M., ed., Oxford University Press, New York, 1988; Biocomputing: Informatics and Genome Projects, Smith, D. W., ed., Academic Press, New York, 1993; Computer Analysis of Sequence Data, Part I, Griffin, A. M., and Griffin, H. G., eds., Humana Press, New Jersey, 1994; Sequence Analysis in Molecular Biology, von Heinje, G., Academic Press, 1987; and Sequence Analysis Primer, Gribskov, M. and Devereux, J., eds., M Stockton Press, New York, 1991; and Carillo et al. (1988) SIAM J Applied Math 48:1073). Alternatively, the skilled person can number the residues by chymotrypsin number, thereby identify corresponding residues. For closely related sequences, a computer algorithm is not needed; alignment can be done visually.

[0234] As used herein, a “global alignment” is an alignment that aligns two sequences from beginning to end, aligning each letter in each sequence only once. An alignment is produced, regardless of whether or not there is similarity or identity between the sequences. For example, 50% sequence identity based on “global alignment” means that in an alignment of the full sequence of two compared sequences each of 100 nucleotides in length, 50% of the residues are the same. It is understood that global alignment also can be used in determining sequence identity even when the length of the aligned sequences is not the same. The differences in the terminal ends of the sequences are taken into account in determining sequence identity, unless the “no penalty for end gaps” is selected. Generally, a global alignment is used on sequences that share significant similarity over most of their length. Exemplary algorithms for performing global alignment include the Needleman-Wunsch algorithm (Needleman et al. (1970) J. Mol. Biol. 48: 443). Exemplary programs for performing global alignment are publicly available and include the Global Sequence Alignment Tool available at the National Center for Biotechnology Information (NCBI) website (ncbi.nlm.nih.gov/), and the program available at deepc2.psi.iastate.edu/aat/align/align.html.

[0235] As used herein, a “local alignment” is an alignment that aligns two sequences, but only aligns those portions of the sequences that share similarity or identity. Hence, a local alignment determines if sub-segments of one sequence are present in another sequence. If there is no similarity, no alignment is returned. Local alignment algorithms include BLAST and Smith-Waterman algorithm (Adv. Appl. Math. 2: 482 (1981)). For example, 50% sequence identity based on “local alignment” means that in an alignment of the full sequence of two compared sequences of any length, a region of similarity or identity of 100 nucleotides in length has 50% of the residues that are the same in the region of similarity or identity.

[0236] For purposes herein, sequence identity can be determined by standard alignment algorithm programs used with default gap penalties established by each supplier. Default parameters for the GAP program can include: (1) a unary comparison matrix (containing a value of 1 for identities and 0 for non identities) and the weighted comparison matrix of Gribskov et al. (1986) Nucl. Acids Res. 14: 6745, as described by Schwartz and Dayhoff, eds., Atlas of Protein Sequence and Structure, National Biomedical Research Foundation, pp. 353-358 (1979); (2) a penalty of 3.0 for each gap and an additional 0.10 penalty for each symbol in each gap; and (3) no penalty for end gaps. Whether any two nucleic acid molecules have nucleotide sequences or any two polypeptides have amino acid sequences that are at least 80%, 85%, 90%, 95%, 96%, 97%, 98% or 99% “identical,” or other similar variations reciting a percent identity, can be determined using known computer algorithms based on local or global alignment (see, e.g., wikipedia.org/wiki/Sequence_alignment software, providing links to dozens of known and publicly available alignment databases and programs). Generally, for purposes herein sequence identity is determined using computer algorithms based on global alignment, such as the Needleman-Wunsch Global Sequence Alignment tool available from NCBI/BLAST (blast.ncbi.nlm.nih.gov/Blast.cgi? CMD=Web&Page_TYPE=BlastHome); LAlign (William Pearson implementing the Huang and Miller algorithm (Adv. Appl. Math. (1991) 12:337-357)); and program from Xiaoqui Huang available at deepc2.psi.iastate. edu/aat/align/align.html. Generally, when comparing nucleotide sequences herein, an alignment with penalty for end gaps is used. Local alignment also can be used when the sequences being compared are substantially the same length.

[0237] As used herein, the term “identity” represents a comparison or alignment between a test and a reference polypeptide or polynucleotide. In one non-limiting example, “at least 90% identical to” refers to percent identities from 90% to 100% relative to the reference polypeptide or polynucleotide. Identity at a level of 90% or more is indicative of the fact that, assuming for exemplification purposes a test and reference polypeptide or polynucleotide length of 100 amino acids or nucleotides are compared, no more than 10% (i.e., 10 out of 100) of amino acids or nucleotides in the test polypeptide or polynucleotide differs from that of the reference polypeptides. Similar comparisons can be made between a test and reference polynucleotides. Such differences can be represented as point mutations randomly distributed over the entire length of an amino acid sequence or they can be clustered in one or more locations of varying length up to the maximum allowable, e.g., 10/100 amino acid difference (approximately 90% identity). Differences also can be due to deletions or truncations of amino acid residues. Differences are defined as nucleic acid or amino acid substitutions, insertions or deletions. Depending on the length of the compared sequences, at the level of homologies or identities above about 85-90%, the result can be independent of the program and gap parameters set; such high levels of identity can be assessed readily, often without relying on software.

[0238] As used herein, a disulfide bond (also called an S—S bond or a disulfide bridge) is a single covalent bond derived from the coupling of thiol groups. Disulfide bonds in proteins are formed between the thiol groups of cysteine residues, and stabilize interactions between polypeptide domains.

[0239] As used herein, “coupled” or “conjugated” means attached via a covalent or noncovalent interaction. Conjugates provided herein, contain a modified u-PA polypeptide protease domain (referred to as a “SPD,” see, e.g., FIG. 4), and all or portion of the remaining u-PA polypeptide, linked directly or vial a linker to another moiety, such as a polypeptide that confers a property, such as increased serum half life (i.e., human serum albumin HSA), or facilitates expression or purification (i.e., SUMO, his-SUMO, TSG-6), or targets the protein to receptor, such as an antibody that binds to a receptor. The polypeptide can be linked directly or via a polypeptide linker, generally a short, about 4-20, amino acids, such as combinations of Ser and Gly residues. Conjugates that contain a polypeptide generally are fusion proteins. Conjugates also include modified u-PA polypeptides in which amino acid residues are linked to moieties, such as PEG moieties, glycosylation moieties and other such moieties.

[0240] As used herein, “primer” refers to a nucleic acid molecule that can act as a point of initiation of template-directed DNA synthesis under appropriate conditions (e.g., in the presence of four different nucleoside triphosphates and a polymerization agent, such as DNA polymerase, RNA polymerase or reverse transcriptase) in an appropriate buffer and at a suitable temperature. The skilled person understands that certain nucleic acid molecules can serve as a “probe” and as a “primer.” A primer, however, has a 3′ hydroxyl group for extension. A primer can be used in a variety of methods, including, for example, polymerase chain reaction (PCR), reverse-transcriptase (RT)-PCR, RNA PCR, LCR, multiplex PCR, panhandle PCR, capture PCR, expression PCR, 3′ and 5′ RACE, in situ PCR, ligation-mediated PCR and other amplification protocols.

[0241] As used herein, “primer” refers to an oligonucleotide containing two or more deoxyribonucleotides or ribonucleotides, typically more than three, from which synthesis of a primer extension product can be initiated. Experimental conditions conducive to synthesis include the presence of nucleoside triphosphates and an agent for polymerization and extension, such as DNA polymerase, and a suitable buffer, temperature and pH.

[0242] As used herein, “primer pair” refers to a set of primers that includes a 5′ (upstream) primer that hybridizes with the 5′ end of a sequence to be amplified (e.g. by PCR) and a 3′ (downstream) primer that hybridizes with the complement of the 3′ end of the sequence to be amplified.

[0243] As used herein, “specifically hybridizes” refers to annealing, by complementary base-pairing, of a nucleic acid molecule (e.g. an oligonucleotide) to a target nucleic acid molecule. Those of skill in the art are familiar with in vitro and in vivo parameters that affect specific hybridization, such as length and composition of the particular molecule. Parameters particularly relevant to in vitro hybridization further include annealing and washing temperature, buffer composition and salt concentration. Exemplary washing conditions for removing non-specifically bound nucleic acid molecules at high stringency are 0.1×SSPE, 0.1% SDS, 65° C., and at medium stringency are 0.2×SSPE, 0.1% SDS, 50° C. Equivalent stringency conditions are known in the art. The skilled person can readily adjust these parameters to achieve specific hybridization of a nucleic acid molecule to a target nucleic acid molecule appropriate for a particular application.

[0244] As used herein, substantially identical to a product means sufficiently similar so that the property of interest is sufficiently unchanged so that the substantially identical product can be used in place of the product.

[0245] As used herein, it also is understood that the terms “substantially identical” or “similar” varies with the context as understood by those skilled in the relevant art.

[0246] As used herein, the wild-type form of a polypeptide or nucleic acid molecule is a form encoded by a gene or by a coding sequence encoded by the gene. Typically, a wild-type form of a gene, or molecule encoded thereby, does not contain mutations or other modifications that alter function or structure. The term wild-type also encompasses forms with allelic variation as occurs among and between species. As used herein, a predominant form of a polypeptide or nucleic acid molecule refers to a form of the molecule that is the major form produced from a gene. A “predominant form” varies from source to source. For example, different cells or tissue types can produce different forms of polypeptides, for example, by alternative splicing and/or by alternative protein processing. In each cell or tissue type, a different polypeptide can be a “predominant form.”

[0247] As used herein, an allelic variant or allelic variation references any of two or more alternative forms of a gene occupying the same chromosomal locus. Allelic variation arises naturally through mutation, and can result in phenotypic polymorphism within populations. Gene mutations can be silent (no change in the encoded polypeptide) or can encode polypeptides having altered amino acid sequence. The term “allelic variant” also is used herein to denote a protein encoded by an allelic variant of a gene. Typically the reference form of the gene encodes a wild type form and/or predominant form of a polypeptide from a population or single reference member of a species. Typically, allelic variants, which include variants between and among species, have at least 80%, 90% or greater amino acid identity with a wild-type and/or predominant form from the same species; the degree of identity depends upon the gene and whether comparison is interspecies or intraspecies. Generally, intraspecies allelic variants have at least or at least about 80%, 85%, 90% or 95% identity or greater with a wild type and/or predominant form, including at least or at least about 96%, 97%, 98%, 99% or greater identity with a wild-type and/or predominant form of a polypeptide.

[0248] As used herein, “allele,” which is used interchangeably herein with “allelic variant” refers to alternative forms of a gene or portions thereof. Alleles occupy the same locus or position on homologous chromosomes. When a subject has two identical alleles of a gene, the subject is said to be homozygous for that gene or allele. When a subject has two different alleles of a gene, the subject is said to be heterozygous for the gene. Alleles of a specific gene can differ from each other in a single nucleotide or several nucleotides, and can include substitutions, deletions and insertions of nucleotides. An allele of a gene also can be a form of a gene containing a mutation.

[0249] As used herein, species variants refer to variants in polypeptides among different species, including different mammalian species, such as mouse and human. Generally, species variants have about or 70%, 75%, 80%, 85%, 90%, 91%, 92%, 93%, 94%, 95%, 96%, 97%, 98% or 99% or more sequence identity. Corresponding residues between and among species variants can be determined by comparing and aligning sequences to maximize the number of matching nucleotides or residues, for example, such that identity between the sequences is equal to or greater than 95%, equal to or greater than 96%, equal to or greater than 97%, equal to or greater than 98% or equal to greater than 99%. The position of interest is then given the number assigned in the reference nucleic acid molecule. Alignment can be effected manually or by eye, particularly, where sequence identity is greater than 80%.

[0250] As used herein, a splice variant refers to a variant produced by differential processing of a primary transcript of genomic DNA that results in more than one type of mRNA.

[0251] As used herein, modification in reference to modification of the primary sequence of amino acids of a polypeptide or a sequence of nucleotides in a nucleic acid molecule and includes deletions, insertions, and replacements of amino acids and nucleotides, respectively. This in contrast to modifications of the polypeptide itself, which include post-translational modifications, such as glycosylation, farnysylation, pegylation, and fusions, such as fusions with other polypeptides to change a property, such as serum half-life, such as by albumination, fusion with albumin, such as human serum albumin, and other such modifications to the polypeptide. Thus reference to modifications of the sequence of amino acids refers to insertions, deletions, substitutions/replacements, and combinations thereof. Modification of the polypeptide refers to modifications that are added to the polypeptide that do not change the sequence thereof.

[0252] For purposes herein, amino acid substitutions, deletions and/or insertions, can be made in any of u-PA polypeptide or catalytically active fragment thereof provided that the resulting protein exhibits protease activity or other activity (or, if desired, such changes can be made to eliminate activity). Modifications can be made by making conservative amino acid substitutions and also non-conservative amino acid substitutions. For example, amino acid substitutions that desirably or advantageously alter properties of the proteins can be made. In one embodiment, mutations that prevent degradation of the polypeptide can be made. Many proteases cleave after basic residues, such as R and K; to eliminate such cleavage, the basic residue is replaced with a non-basic residue. Interaction of the protease with an inhibitor can be blocked while retaining catalytic activity by effecting a non-conservative change at the site of interaction of the inhibitor with the protease. Other activities also can be altered. For example, receptor binding can be altered without altering catalytic activity.

[0253] Amino acid substitutions contemplated include conservative substitutions, such as those set forth in Table 3, which do not eliminate proteolytic activity. As described herein, substitutions that alter properties of the proteins, such as removal of cleavage sites and other such sites also are contemplated; such substitutions are generally non-conservative, but can be readily effected by those of skill in the art.

[0254] As used herein, suitable conservative substitutions of amino acids are known to those of skill in this art and can be made generally without altering the biological activity of the resulting molecule. Those of skill in this art recognize that, in general, single amino acid substitutions in non-essential regions of a polypeptide do not substantially alter biological activity (see, e.g., Watson et al. Molecular Biology of the Gene, 4th Edition, 1987, The Benjamin/Cummings Pub. Co., p. 224). Such substitutions can be made in accordance with those set forth in Table 3 as follows:

TABLE 3

| Original residue | Exemplary conservative substitution |
|---|---|
| Ala (A) | Gly; Ser |
| Arg (R) | Lys |
| Asn (N) | Gln; His |
| Cys (C) | Ser |
| Gln (Q) | Asn |
| Glu (E) | Asp |
| Gly (G) | Ala; Pro |
| His (H) | Asn; Gln |
| Ile (I) | Leu; Val |
| Leu (L) | Ile; Val |
| Lys (K) | Arg; Gln; Glu |
| Met (M) | Leu; Tyr; Ile |
| Phe (F) | Met; Leu; Tyr |
| Ser (S) | Thr |
| Thr (T) | Ser |
| Trp (W) | Tyr |
| Tyr (Y) | Trp; Phe |
| Val (V) | Ile; Leu |

[0255] Other substitutions also are permissible and can be determined empirically or in accord with known conservative substitutions.

[0256] As used herein, the term promoter means a portion of a gene containing DNA sequences that provide for the binding of RNA polymerase and initiation of transcription. Promoter sequences are commonly, but not always, found in the 5′ non-coding region of genes.

[0257] As used herein, isolated or purified polypeptide or protein or biologically-active portion thereof is substantially free of cellular material or other contaminating proteins from the cell of tissue from which the protein is derived, or substantially free from chemical precursors or other chemicals when chemically synthesized. Preparations can be determined to be substantially free if they appear free of readily detectable impurities as determined by standard methods of analysis, such as thin layer chromatography (TLC), gel electrophoresis and high performance liquid chromatography (HPLC), used by those of skill in the art to assess such purity, or sufficiently pure such that further purification would not detectably alter the physical and chemical properties, such as enzymatic and biological activities, of the substance. Methods for purification of the compounds to produce substantially chemically pure compounds are known to those of skill in the art. A substantially chemically pure compound, however, can be a mixture of stereoisomers. In such instances, further purification might increase the specific activity of the compound.

[0258] The term substantially free of cellular material includes preparations of proteins in which the protein is separated from cellular components of the cells from which it is isolated or recombinantly-produced. In one embodiment, the term substantially free of cellular material includes preparations of protease proteins having less that about 30% (by dry weight) of non-protease proteins (also referred to herein as a contaminating protein), generally less than about 20% of non-protease proteins or 10% of non-protease proteins or less that about 5% of non-protease proteins. When the protease protein or active portion thereof is recombinantly produced, it also is substantially free of culture medium, i.e., culture medium represents less than, about, or equal to 20%, 10% or 5% of the volume of the protease protein preparation.

[0259] As used herein, the term substantially free of chemical precursors or other chemicals includes preparations of protease proteins in which the protein is separated from chemical precursors or other chemicals that are involved in the synthesis of the protein. The term includes preparations of protease proteins having less than about 30% (by dry weight), 20%, 10%, 5% or less of chemical precursors or non-protease chemicals or components.

[0260] As used herein, production by recombinant means by using recombinant DNA methods refers to the use of the well known methods of molecular biology for expressing proteins encoded by cloned DNA.

[0261] As used herein, “expression” refers to the process by which polypeptides are produced by transcription and translation of polynucleotides. The level of expression of a polypeptide can be assessed using any method known in art, including, for example, methods of determining the amount of the polypeptide produced from the host cell. Such methods can include, but are not limited to, quantitation of the polypeptide in the cell lysate by ELISA, Coomassie blue staining following gel electrophoresis, Lowry protein assay and Bradford protein assay.

[0262] As used herein, a “host cell” is a cell that is used to receive, maintain, reproduce and/or amplify a vector. Host cells also can be used to express the polypeptide encoded by the vector. The nucleic acid contained in the vector is replicated when the host cell divides, thereby amplifying the nucleic acids.

[0263] As used herein, a “vector” or “plasmid” is a replicable nucleic acid from which one or more heterologous proteins can be expressed when the vector is transformed into an appropriate host cell. Reference to a vector includes discrete elements that are used to introduce heterologous nucleic acid into cells for either expression or replication thereof. Reference to a vector also includes those vectors into which a nucleic acid encoding a polypeptide or fragment thereof can be introduced, typically by restriction digest and ligation. Reference to a vector also includes those vectors that contain nucleic acid encoding a protease, such as a modified u-PA. The vector is used to introduce the nucleic acid encoding the polypeptide into the host cell for amplification of the nucleic acid or for expression/display of the polypeptide encoded by the nucleic acid. The vectors typically remain episomal, but can be designed to effect integration of a gene or portion thereof into a chromosome of the genome. Also contemplated are vectors that are artificial chromosomes, such as yeast artificial chromosomes and mammalian artificial chromosomes. Selection and use of such vehicles are well-known to those of skill in the art. A vector also includes “virus vectors” or “viral vectors.” Viral vectors are engineered viruses that are operatively linked to exogenous genes to transfer (as vehicles or shuttles) the exogenous genes into cells.

[0264] As used herein, an “expression vector” includes vectors capable of expressing DNA that is operatively linked with regulatory sequences, such as promoter regions, that are capable of effecting expression of such DNA fragments. Such additional segments can include promoter and terminator sequences, and optionally can include one or more origins of replication, one or more selectable markers, an enhancer, a polyadenylation signal, and the like. Expression vectors are generally derived from plasmid or viral DNA, or can contain elements of both. Thus, an expression vector refers to a recombinant DNA or RNA construct, such as a plasmid, a phage, recombinant virus or other vector that, upon introduction into an appropriate host cell, results in expression of the cloned DNA. Appropriate expression vectors are well known to those of skill in the art and include those that are replicable in eukaryotic cells and/or prokaryotic cells and those that remain episomal or those which integrate into the host cell genome.

[0265] As used herein, vector also includes “virus vectors” or “viral vectors.” Viral vectors are engineered viruses that are operatively linked to exogenous genes to transfer (as vehicles or shuttles) the exogenous genes into cells.

[0266] As used herein, an adenovirus refers to any of a group of DNA-containing viruses that cause conjunctivitis and upper respiratory tract infections in humans. As used herein, naked DNA refers to histone-free DNA that can be used for vaccines and gene therapy. Naked DNA is the genetic material that is passed from cell to cell during a gene transfer processed called transformation. In transformation, purified or naked DNA is taken up by the recipient cell which will give the recipient cell a new characteristic or phenotype.

[0267] As used herein, “operably linked” with reference to nucleic acid sequences, regions, elements or domains means that the nucleic acid regions are functionally related to each other. For example, nucleic acid encoding a leader peptide can be operably linked to nucleic acid encoding a polypeptide, whereby the nucleic acids can be transcribed and translated to express a functional fusion protein, where the leader peptide effects secretion of the fusion polypeptide. In some instances, the nucleic acid encoding a first polypeptide (e.g., a leader peptide) is operably linked to nucleic acid encoding a second polypeptide and the nucleic acids are transcribed as a single mRNA transcript, but translation of the mRNA transcript can result in one of two polypeptides being expressed. For example, an amber stop codon can be located between the nucleic acid encoding the first polypeptide and the nucleic acid encoding the second polypeptide, such that, when introduced into a partial amber suppressor cell, the resulting single mRNA transcript can be translated to produce either a fusion protein containing the first and second polypeptides, or can be translated to produce only the first polypeptide. In another example, a promoter can be operably linked to nucleic acid encoding a polypeptide, whereby the promoter regulates or mediates the transcription of the nucleic acid.

[0268] As used herein, “primary sequence” refers to the sequence of amino acid residues in a polypeptide or the sequence of nucleotides in a nucleic acid molecule.

[0269] As used herein, protein binding sequence refers to a protein or peptide sequence that is capable of specific binding to other protein or peptide sequences generally, to a set of protein or peptide sequences or to a particular protein or peptide sequence.

[0270] As used herein, a “tag” or an “epitope tag” refers to a sequence of amino acids, typically added to the N- or C-terminus of a polypeptide, such as a u-PA provided herein. The inclusion of tags fused to a polypeptide can facilitate polypeptide purification and/or detection. Typically, a tag or tag polypeptide refers to a polypeptide that has enough residues to provide an epitope recognized by an antibody or can serve for detection or purification, yet is short enough such that it does not interfere with activity of the polypeptide to which it is linked. The tag polypeptide typically is sufficiently unique so that an antibody that specifically binds thereto does not substantially cross-react with epitopes in the polypeptide to which it is linked. Epitope tagged proteins can be affinity purified using highly specific antibodies raised against the tags.

[0271] Suitable tag polypeptides generally have at least 5 or 6 amino acid residues and usually between about 8-50 amino acid residues, typically between 9-30 residues. The tags can be linked to one or more proteins and permit detection of the protein or its recovery from a sample or mixture. Such tags are well-known and can be readily synthesized and designed. Exemplary tag polypeptides include those used for affinity purification and include, Small Ubiquitin-like Modifier (SUMO) tags, FLAG tags, His tags, the influenza hemagglutinin (HA) tag polypeptide and its antibody 12CA5, (Field et al. (1988) Mol. Cell. Biol. 8:2159-2165); the c-myc tag and the 8F9, 3C7, 6E10, G4, B7 and 9E10 antibodies thereto (see, e.g., Evan et al. (1985) Molecular and Cellular Biology 5:3610-3616); and the Herpes Simplex virus glycoprotein D (gD) tag and its antibody (Paborsky et al. (1990) Protein Engineering 3:547-553). An antibody used to detect an epitope-tagged antibody is typically referred to herein as a secondary antibody.

[0272] As used herein, metal binding sequence refers to a protein or peptide sequence that is capable of specific binding to metal ions generally, to a set of metal ions or to a particular metal ion.

[0273] As used herein the term assessing is intended to include quantitative and qualitative determination in the sense of obtaining an absolute value for the activity of a protease, or a domain thereof, present in the sample, and also of obtaining an index, ratio, percentage, visual or other value indicative of the level of the activity. Assessment can be direct or indirect and the chemical species actually detected need not of course be the proteolysis product itself but can, for example, be a derivative thereof or some further substance. For example, detection of a cleavage product of a complement protein, such as by SDS-PAGE and protein staining with Coomassie blue.

[0274] As used herein, biological activity refers to the in vivo activities of a compound or physiological responses that result upon in vivo administration of a compound, composition or other mixture. Biological activity, thus, encompasses therapeutic effects and pharmaceutical activity of such compounds, compositions and mixtures. Biological activities can be observed in in vitro systems designed to test or use such activities. Thus, for purposes herein a biological activity of a protease is its catalytic activity in which a polypeptide is hydrolyzed.

[0275] As used herein, equivalent, when referring to two sequences of nucleic acids, means that the two sequences in question encode the same sequence of amino acids or equivalent proteins. When equivalent is used in referring to two proteins or peptides, it means that the two proteins or peptides have substantially the same amino acid sequence with only amino acid substitutions (such as, but not limited to, conservative changes such as those set forth in Table 3, above) that do not substantially alter the activity or function of the protein or peptide. When equivalent refers to a property, the property does not need to be present to the same extent (e.g., two peptides can exhibit different rates of the same type of enzymatic activity), but the activities are usually substantially the same. Complementary, when referring to two nucleotide sequences, means that the two sequences of nucleotides are capable of hybridizing, typically with less than 25%, 15% or 5% mismatches between opposed nucleotides. If necessary, the percentage of complementarity will be specified. Typically the two molecules are selected such that they will hybridize under conditions of high stringency.

[0276] As used herein, an agent that modulates the activity of a protein or expression of a gene or nucleic acid either decreases or increases or otherwise alters the activity of the protein or, in some manner, up- or down-regulates or otherwise alters expression of the nucleic acid in a cell.

[0277] As used herein, a “chimeric protein” or “fusion protein” protease refers to a polypeptide operatively-linked to a different polypeptide. A chimeric or fusion protein provided herein can include one or more proteases or a portion thereof, such as single chain protease domains thereof, and one or more other polypeptides for any one or more of a transcriptional/translational control signals, signal sequences, a tag for localization, a tag for purification, part of a domain of an immunoglobulin G, and/or a targeting agent. These chimeric or fusion proteins include those produced by recombinant means as fusion proteins, those produced by chemical means, such as by chemical coupling, through, for example, coupling to sulfhydryl groups, and those produced by any other method whereby at least one protease, or a portion thereof, is linked, directly or indirectly via linker(s) to another polypeptide.

[0278] As used herein, operatively-linked when referring to a fusion protein refers to a protease polypeptide and a non-protease polypeptide that are fused in-frame to one another. The non-protease polypeptide can be fused to the N-terminus or C-terminus of the protease polypeptide.

[0279] As used herein, a targeting agent is any moiety, such as a protein or effective portion thereof, that provides specific binding of the conjugate to a cell surface receptor, which in some instances can internalize bound conjugates or portions thereof. A targeting agent also can be one that promotes or facilitates, for example, affinity isolation or purification of the conjugate; attachment of the conjugate to a surface; or detection of the conjugate or complexes containing the conjugate.

[0280] As used herein, “linker” refers to short sequences of amino acids that join two polypeptides (or nucleic acid encoding such polypeptides). “Peptide linker” refers to the short sequence of amino acids joining the two polypeptide sequences. Exemplary of polypeptide linkers are linkers joining two antibody chains in a synthetic antibody fragment such as an scFv fragment. Linkers are well-known and any known linkers can be used in the provided methods. Exemplary of polypeptide linkers are (Gly-Ser)ₙ amino acid sequences, with some Glu or Lys residues dispersed throughout to increase solubility. Other exemplary linkers are described herein; any of these and other known linkers can be used with the provided compositions and methods.

[0281] As used herein, derivative or analog of a molecule refers to a portion derived from or a modified version of the molecule.

[0282] As used herein, “disease or disorder” refers to a pathological condition in an organism resulting from cause or condition including, but not limited to, infections, acquired conditions, genetic conditions, conditions related to environmental exposures and human behaviors, and conditions characterized by identifiable symptoms. Diseases or disorders include clinically diagnosed disease as well as disruptions in the normal state of the organism that have not been diagnosed as clinical disease. Diseases and disorders of interest herein are those involving complement activation, including those mediated by complement activation and those in which complement activation plays a role in the etiology or pathology. Diseases and disorders of interest herein include those characterized by complement activation (e.g., age-related macular degeneration and renal delayed graft function).

[0283] As used herein, macular degeneration occurs when the small central portion of the retina, known as the macula, deteriorates. There are two types of AMD: dry (atrophic) and wet (neovascular or exudative). Most AMD starts as the dry type and in 10-20% of individuals, it progresses to the wet type. Age-related macular degeneration is always bilateral (i.e., occurs in both eyes), but does not necessarily progress at the same pace in both eyes.

[0284] As used herein, age-related macular degeneration (AMD) is an inflammatory disease that causes visual impairment and blindness in older people. The proteins of the complement system are central to the development of this disease. Local and systemic inflammation in AMD are mediated by the deregulated action of the alternative pathway of the complement system.

[0285] As used herein, delayed graft function (DGF) is a manifestation of acute kidney injury (AKI) with attributes unique to the transplant process. It occurs post-transplant surgery. Delayed graft function (DGF) is a common complication frequently defined as the need for dialysis during the first post transplant week. Intrinsic renal synthesis of the third complement component C3 (C3) contributes to acute rejection by priming a T-cell-mediated response. For example, in brain dead donors, local renal C3 levels are higher at procurement and inversely related to renal function 14 days after transplant.

[0286] As used herein, a complement-mediated disease or disorder is any disorder in which any one or more of the complement proteins plays a role in the disease, either due to an absence or presence of a complement protein or complement-related protein or activation or inactivation of a complement or complement-related protein. In some embodiments, a complement-mediated disorder is one that is due to a deficiency in a complement protein(s). In other embodiments as described herein a complement-mediated disorder is one that is due to activation or over-activation of a complement protein(s). A complement-mediated disorder also is one that is due to the presence of any one or more of the complement proteins and/or the continued activation of the complement pathway.

[0287] As used herein, “macular degeneration-related disorder” refers to any of a number of conditions in which the retinal macula degenerates or becomes dysfunctional (e.g., as a consequence of decreased growth of cells of the macula, increased death or rearrangement of the cells of the macula (e.g., RPE cells), loss of normal biological function, or a combination of these events). Macular degeneration results in the loss of integrity of the histoarchitecture of the cells and/or extracellular matrix of the normal macula and/or the loss of function of the cells of the macula. Examples of macular degeneration-related disorder include age-related macular degeneration (AMD), geographic atrophy (GA), North Carolina macular dystrophy, Sorsby's fundus dystrophy, Stargardt's disease, pattern dystrophy, Best disease, dominant drusen, and malattia leventinese (radial drusen). Macular degeneration-related disorder also encompasses extramacular changes that occur prior to, or following dysfunction and/or degeneration of the macula. Thus, the term “macular degeneration-related disorder” also broadly includes any condition which alters or damages the integrity or function of the macula (e.g., damage to the RPE or Bruch's membrane). For example, the term encompasses retinal detachment, chorioretinal degenerations, retinal degenerations, photoreceptor degenerations, RPE degenerations, mucopolysaccharidoses, rod-cone dystrophies, cone-rod dystrophies and cone degenerations.

[0288] A macular degeneration-related disorder described herein includes macular degeneration, such as, for example, AMD macular degeneration. A macular degeneration-related disorder includes disorders treated by anti-VEGF treatment, such as, for example, anti-VEGF antibodies, or laser treatment or an implantable telescope.

[0289] As used herein, “treating” a subject with a disease or condition means that the subject's symptoms are partially or totally alleviated, or remain static following treatment. Hence treatment encompasses prophylaxis, therapy and/or cure. Prophylaxis refers to prevention of a potential disease and/or a prevention of worsening of symptoms or progression of a disease. Treatment also encompasses any pharmaceutical use of a modified u-PA polypeptide and compositions provided herein.

[0290] As used herein, “prevention” or “prophylaxis” refers to methods in which the risk or probability of developing a disease or condition is reduced.

[0291] As used herein, a “therapeutic agent,” “therapeutic regimen,” “radioprotectant,” or “chemotherapeutic” mean conventional drugs and drug therapies, including vaccines, which are known to those skilled in the art. Radiotherapeutic agents are well known in the art.

[0292] As used herein, “treatment” means any manner in which the symptoms of a condition, disorder or disease are ameliorated or otherwise beneficially altered. Treatment also encompasses any pharmaceutical use of the compositions herein.

[0293] As used herein, “amelioration of the symptoms” of a particular disease or disorder by a treatment, such as by administration of a pharmaceutical composition or other therapeutic, refers to any lessening, whether permanent or temporary, lasting or transient, of the symptoms that can be attributed to or associated with administration of the composition or therapeutic.

[0294] As used herein, a “pharmaceutically effective agent” includes any therapeutic agent or bioactive agents, including, but not limited to, for example, anesthetics, vasoconstrictors, dispersing agents, and conventional therapeutic drugs, including small molecule drugs and therapeutic proteins.

[0295] As used herein an “effective amount” of a compound or composition for treating a particular disease is an amount that is sufficient to ameliorate, or in some manner reduce the symptoms associated with the disease. Such amount can be administered as a single dosage or can be administered according to a regimen, whereby it is effective. The amount can cure the disease but, typically, is administered in order to ameliorate the symptoms of the disease. Typically, repeated administration is required to achieve a desired amelioration of symptoms.

[0296] As used herein, a “therapeutically effective amount” or a “therapeutically effective dose” refers to the quantity of an agent, compound, material, or composition containing a compound that is at least sufficient to produce a therapeutic effect following administration to a subject. Hence, it is the quantity necessary for preventing, curing, ameliorating, arresting or partially arresting a symptom of a disease or disorder.

[0297] As used herein, a “therapeutic effect” means an effect resulting from treatment of a subject that alters, typically improves or ameliorates, the symptoms of a disease or condition or that cures a disease or condition.

[0298] As used herein, a “prophylactically effective amount” or a “prophylactically effective dose” refers to the quantity of an agent, compound, material, or composition containing a compound that when administered to a subject, have the intended prophylactic effect, e.g., preventing or delaying the onset, or reoccurrence, of disease or symptoms, reducing the likelihood of the onset, or reoccurrence, of disease or symptoms, or reducing the incidence of viral infection. The full prophylactic effect does not necessarily occur by administration of one dose, and can occur only after administration of a series of doses. Thus, a prophylactically effective amount can be administered in one or more administrations.

[0299] As used herein, “administration of a non-complement protease”, such as a modified u-PA protease, refers to any method in which the non-complement protease is contacted with its substrate. Administration can be effected in vivo or ex vivo or in vitro. For example, for ex vivo administration a body fluid, such as blood, is removed from a subject and contacted outside the body with the modified non-complement protease, such as a modified u-PA protease. For in vivo administration, the modified non-complement protease, such as a modified u-PA protease, can be introduced into the body, such as by local, topical, systemic and/or other route of introduction. In vitro administration encompasses methods, such as cell culture methods.

[0300] As used herein, “unit dose form” refers to physically discrete units suitable for human and animal subjects and packaged individually as is known in the art.

[0301] As used herein, “patient” or “subject” to be treated includes humans and human or non-human animals. Mammals include; primates, such as humans, chimpanzees, gorillas and monkeys; domesticated animals, such as dogs, horses, cats, pigs, goats and cows; and rodents such as mice, rats, hamsters and gerbils.

[0302] As used herein, a “combination” refers to any association between or among two or more items. The association can be spatial or refer to the use of the two or more items for a common purpose. The combination can be two or more separate items, such as two compositions or two collections, a mixture thereof, such as a single mixture of the two or more items, or any variation thereof. The elements of a combination are generally functionally associated or related.

[0303] As used herein, a “composition” refers to any mixture of two or more products or compounds (e.g., agents, modulators, regulators, etc.). It can be a solution, a suspension, liquid, powder, a paste, aqueous or non-aqueous formulations or any combination thereof.

[0304] As used herein, a stabilizing agent refers to compound added to the formulation to protect either the antibody or conjugate, such as under the conditions (e.g. temperature) at which the formulations herein are stored or used. Thus, included are agents that prevent proteins from degradation from other components in the compositions. Exemplary of such agents are amino acids, amino acid derivatives, amines, sugars, polyols, salts and buffers, surfactants, inhibitors or substrates and other agents as described herein.

[0305] As used herein, “fluid” refers to any composition that can flow. Fluids thus encompass compositions that are in the form of semi-solids, pastes, solutions, aqueous mixtures, gels, lotions, creams and other such compositions.

[0306] As used herein, an “article of manufacture” is a product that is made and sold. As used throughout this application, the term is intended to encompass a therapeutic agent with a modified u-PA polypeptide or nucleic acid molecule contained in the same or separate articles of packaging.

[0307] As used herein, a “kit” refers to a packaged combination, optionally including reagents and other products and/or components for practicing methods using the elements of the combination. For example, kits containing a modified protease polypeptide, such as a modified u-PA protease provided herein, or nucleic acid molecule provided herein and another item for a purpose including, but not limited to, administration, diagnosis, and assessment of a biological activity or property are provided. Kits optionally include instructions for use.

[0308] As used herein, a “cellular extract” refers to a preparation or fraction which is made from a lysed or disrupted cell.

[0309] As used herein, “animal” includes any animal, such as, but not limited to; primates including humans, gorillas and monkeys; rodents, such as mice and rats; fowl, such as chickens; ruminants, such as goats, cows, deer, sheep; porcine, such as pigs and other animals. Non-human animals exclude humans as the contemplated animal. The proteases provided herein are from any source, animal, plant, prokaryotic and fungal. Most proteases are of animal origin, including mammalian origin.

[0310] As used herein, a “single dosage” formulation refers to a formulation containing a single dose of therapeutic agent for direct administration. Single dosage formulations generally do not contain any preservatives.

[0311] As used herein, a multi-dose formulation refers to a formulation that contains multiple doses of a therapeutic agent and that can be directly administered to provide several single doses of the therapeutic agent. The doses can be administered over the course of minutes, hours, weeks, days or months. Multi-dose formulations can allow dose adjustment, dose-pooling and/or dose-splitting. Because multi-dose formulations are used over time, they generally contain one or more preservatives to prevent microbial growth.

[0312] As used herein, a “control” or “standard” refers to a sample that is substantially identical to the test sample, except that it is not treated with a test parameter, or, if it is a plasma sample, it can be from a normal volunteer not affected with the condition of interest. A control also can be an internal control. For example, a control can be a sample, such as a virus, that has a known property or activity.

[0313] As used herein, the singular forms “a,” “an” and “the” include plural referents unless the context clearly dictates otherwise. Thus, for example, reference to “an” agent includes one or more agents.

[0314] As used herein, the term “or” is used to mean “and/or” unless explicitly indicated to refer to alternatives only or if the alternatives are mutually exclusive.

[0315] As used herein, ranges and amounts can be expressed as “about” a particular value or range. About also includes the exact amount. Hence “about 5 bases” means “about 5 bases” and also “5 bases.”

[0316] As used herein, “optional” or “optionally” means that the subsequently described event or circumstance does or does not occur, and that the description includes instances where said event or circumstance occurs and instances where it does not. For example, an optionally substituted group means that the group is unsubstituted or is substituted.

[0317] As used herein, the abbreviations for any protective groups, amino acids and other compounds, are, unless indicated otherwise, in accord with their common usage, recognized abbreviations, or the IUPAC-IUB Commission on Biochemical Nomenclature (see, (1972) Biochem. 11:1726).

[0318] For clarity of disclosure, and not by way of limitation, the detailed description is divided into the subsections that follow.

### B. U-PA STRUCTURE AND FUNCTION

[0319] Urokinase-type plasminogen activator (u-PA, also called urokinase or urinary plasminogen activator) is a serine protease that catalyzes the hydrolysis of plasminogen into plasmin. u-PA is found in urine, blood, seminal fluids, and in many cancer tissues. It is involved in a variety of biological processes, which are linked to its conversion of plasminogen to plasmin, which itself is a serine protease. Plasmin has roles in a variety of normal and pathological processes including, for example, cell migration and tissue destruction through its cleavage of a variety of molecules including fibrin, fibronectin, proteoglycans, and laminin. u-PA is involved in tissue remodeling during wound healing, inflammatory cell migration, neovascularization and tumor cell invasion. u-PA also cleaves and activates other substrates, including, but not limited to, hepatocyte growth factor/scatter factor (HGF/SF), the latent form of membrane type 1 matrix metalloprotease (MT-SP1), platelet derived growth factors, and others.

[0320] Provided herein are modified Urokinase-type plasminogen activator (u-PA) polypeptides that are modified so that they cleave inhibitory sequences in C3, such that activation of C3 into C3a and C3b fragments is inhibited. The activity/specificity of the modified u-PA polypeptides provided herein is such that they cleave C3 with greater activity and/or specificity or k_{cat}/kₘ compared to the unmodified u-PA polypeptide, particularly of any of SEQ ID NOs: 1-6. The modified u-PA polypeptides also can have reduced activity or specificity or both for a native physiological substrate plasminogen of the unmodified u-PA polypeptide. Thus, the modified u-PA polypeptides provided herein inhibit complement activation in a complement pathway. The modified u-PA polypeptides also exhibit increased selectivity for cleaving C3 compared to other u-PA substrates, such as plasminogen. Therefore, the modified u-PA polypeptides provided herein do not exhibit undesired cleavage activities against physiological native u-PA substrates so that they do no exhibit undesirable side effects. In some embodiments, the modified u-PA polypeptide is a protease domain or a single chain form; in such instances, the free cysteine (residue position 122 by chymotrypsin numbering) is replaced with a serine, to decrease or eliminate aggregation upon preparation of the protein. In embodiments in which the modified u-PA polypeptide is full length or other form in which it is activated by cleavage, the residue at position 122 (by chymotrypsin numbering) generally is not replaced with S so that the disulfide bond can form to produce the two chain activated polypeptide.

[0321] 1. Serine Proteases

[0322] Serine proteases (SPs), which include secreted enzymes and enzymes sequestered in cytoplasmic storage organelles, have a variety of physiological roles, including in blood coagulation, wound healing, digestion, immune responses and tumor invasion and metastasis. For example, chymotrypsin, trypsin, and elastase function in the digestive tract; Factor 10, Factor 11, Thrombin, and Plasmin are involved in clotting and wound healing; and C1r, C1s, and the C3 convertases play a role in complement activation.

[0323] A class of cell surface proteins designated type II transmembrane serine proteases are proteases which are membrane-anchored proteins with extracellular domains. As cell surface proteins, they play a role in intracellular signal transduction and in mediating cell surface proteolytic events. Other serine proteases are membrane bound and function in a similar manner. Others are secreted. Many serine proteases exert their activity upon binding to cell surface receptors, and, hence act at cell surfaces. Cell surface proteolysis is a mechanism for the generation of biologically active proteins that mediate a variety of cellular functions.

[0324] Serine proteases, including secreted and transmembrane serine proteases, are involved in processes that include neoplastic development and progression. While the precise role of these proteases has not been fully elaborated, serine proteases and inhibitors thereof are involved in the control of many intra- and extracellular physiological processes, including degradative actions in cancer cell invasion and metastatic spread, and neovascularization of tumors that are involved in tumor progression. Proteases are involved in the degradation and remodeling of extracellular matrix (ECM) and contribute to tissue remodeling, and are necessary for cancer invasion and metastasis. The activity and/or expression of some proteases have been shown to correlate with tumor progression and development.

[0325] More than 20 families (denoted S1-S27) of serine protease have been identified, and they are grouped into 6 clans (SA, SB, SC, SE, SF and SG) on the basis of structural similarity and other functional evidence (Rawlings N D et al. (1994) Meth. Enzymol. 244: 19-61). There are similarities in the reaction mechanisms of several serine peptidases. Chymotrypsin, subtilisin and carboxypeptidase C clans have a catalytic triad of serine, aspartate and histidine in common: serine acts as a nucleophile, aspartate as an electrophile, and histidine as a base. The geometric orientations of the catalytic residues are similar between families, despite different protein folds. The linear arrangements of the catalytic residues commonly reflect clan relationships. For example the catalytic triad in the chymotrypsin clan (SA) is ordered HDS, but is ordered DHS in the subtilisin clan (SB) and SDH in the carboxypeptidase clan (SC).

[0326] Examples of serine proteases of the chymotrypsin superfamily include tissue-type plasminogen activator (tPA), trypsin, trypsin-like protease, chymotrypsin, plasmin, elastase, urokinase (or urinary-type plasminogen activator, u-PA), acrosin, activated protein C, C1 esterase, cathepsin G, chymase, and proteases of the blood coagulation cascade including kallikrein, thrombin, and Factors VIIa, IXa, Xa, XIa, and XIIa (Barret, A. J., In: Proteinase Inhibitors, Ed. Barrett, A. J., et al., Elsevier, Amsterdam, Pages 3-22 (1986); Strassburger, W. et al., (1983) FEBS Lett., 157:219-223; Dayhoff, M. O., Atlas of Protein Sequence and Structure, Vol 5, National Biomedical Research Foundation, Silver Spring, Md. (1972); and Rosenberg, R. D. et al. (1986) Hosp. Prac., 21: 131-137).

[0327] The activity of proteases in the serine protease family is dependent on a set of amino acid residues that form their active site. One of the residues is always a serine; hence their designation as serine proteases. For example, chymotrypsin, trypsin, and elastase share a similar structure and their active serine residue is at the same position (Ser195) in all three. Despite their similarities, they have different substrate specificities; they cleave different peptide bonds during protein digestion. For example, chymotrypsin prefers an aromatic side chain on the residue whose carbonyl carbon is part of the peptide bond to be cleaved. Trypsin prefers a positively charged Lys or Arg residue at this position. Serine proteases differ markedly in their substrate recognition properties: some are highly specific (i. e. the proteases involved in blood coagulation and the immune complement system); some are only partially specific (i.e. the mammalian digestive proteases trypsin and chymotrypsin); and others, like subtilisin, a bacterial protease, are completely non-specific. Despite these differences in specificity, the catalytic mechanism of serine proteases is well conserved.

[0328] The mechanism of cleavage of a target protein by a serine protease is based on nucleophilic attack of the targeted peptidic bond by a serine. Cysteine, threonine or water molecules associated with aspartate or metals also can play this role. In many cases the nucleophilic property of the group is improved by the presence of a histidine, held in a “proton acceptor state” by an aspartate. Aligned side chains of serine, histidine and aspartate build the catalytic triad common to most serine proteases. For example, the active site residues of chymotrypsin, and serine proteases that are members of the same family as chymotrypsin, such as for example MTSP-1, are Asp102, His57, and Ser195.

[0329] The catalytic domains of all serine proteases of the chymotrypsin superfamily have sequence homology and structural homology. The sequence homology includes the conservation of: 1) the characteristic active site residues (e.g., Ser195, His57, and Asp102 in the case of trypsin); 2) the oxyanion hole (e.g., Gly193, Asp194 in the case of trypsin); and 3) the cysteine residues that form disulfide bridges in the structure (Hartley, B. S., (1974) Symp. Soc. Gen. Microbiol., 24: 152-182). The structural homology includes 1) a common fold characterized by two Greek key structures (Richardson, J. (1981) Adv. Prot. Chem., 34:167-339); 2) a common disposition of catalytic residues; and 3) detailed preservation of the structure within the core of the molecule (Stroud, R. M. (1974) Sci. Am., 231: 24-88).

[0330] Throughout the chymotrypsin family of serine proteases, the backbone interaction between the substrate and enzyme is completely conserved, but the side chain interactions vary considerably. The identity of the amino acids that contain the S1-S4 pockets of the active site determines the substrate specificity of that particular pocket. Grafting the amino acids of one serine protease to another of the same fold modifies the specificity of one to the other. Typically, the amino acids of the protease that contain the S1-S4 pockets are those that have side chains within 4 to 5 angstroms of the substrate. The interactions these amino acids have with the protease substrate are generally called “first shell” interactions because they directly contact the substrate. There, however, can be “second shell” and “third shell” interactions that ultimately position the first shell amino acids. First shell and second shell substrate binding effects are determined primarily by loops between beta-barrel domains. Because these loops are not core elements of the protein, the integrity of the fold is maintained while loop variants with novel substrate specificities can be selected during the course of evolution to fulfill necessary metabolic or regulatory niches at the molecular level. Typically for serine proteases, the following amino acids in the primary sequence are determinants of specificity: 195, 102, 57 (the catalytic triad); 189, 190, 191, 192, and 226 (S1); 57, the loop between 58 and 64, and 99 (S2); 192, 217, 218 (S3); the loop between Cys168 and Cys180, 215, and 97 to 100 (S4); and 41 and 151 (S2′), based on chymotrypsin numbering, where an amino acid in an S1 position affects P1 specificity, an amino acid in an S2 position affects P2 specificity, an amino acid in the S3 position affects P3 specificity, and an amino acid in the S4 position affects P4 specificity. Position 189 in a serine protease is a residue buried at the bottom of the pocket that determines the S1 specificity. Structural determinants for u-PA are listed in Table 4, with protease domains for each of the designated proteases aligned with that of the protease domain of chymotrypsin. The number underneath the Cys168-Cys182 and 60's loop column headings indicate the number of amino acids in the loop between the two amino acids and in the loop. The yes/no designation under the Cys191-Cys220 column headings indicates whether the disulfide bridge is present in the protease. These regions are variable within the family of chymotrypsin-like serine proteases and represent structural determinants in themselves.

[0331] 2. Structure

[0332] u-PA cDNA has been cloned from numerous mammalian species. Exemplary u-PA precursor polypeptides, or prepro-urokinase polypeptides include, but are not limited to, human (SEQ ID NO:1 and encoded by SEQ ID NO:7), mouse (SEQ ID NO:52), rat (SEQ ID NO:53), bovine (SEQ ID NO:54), pig (SEQ ID NO:55), rabbit (SEQ ID NO:56), chicken (SEQ ID NO:57), yellow baboon (SEQ ID NO:58), Sumatran orangutan (SEQ ID NO:59), dog (SEQ ID NO:60), ovine (SEQ ID NO:61), marmoset (SEQ ID NO:62), rhesus monkey (SEQ ID NO:63), northern white-cheeked gibbon (SEQ ID NO:64) and chimpanzee (SEQ ID NO:65) u-PA polypeptides. The mRNA transcript is typically translated to generate a precursor protein containing a 20 amino acid signal sequence at the N-terminus. Following transport to the ER, the signal peptide is removed to yield a prourokinase polypeptide. Exemplary prourokinase polypeptides include, but are not limited to, human (SEQ ID NO:3), mouse (SEQ ID NO:66), rat (SEQ ID NO:67), bovine (SEQ ID NO:68), pig (SEQ ID NO:69), rabbit (SEQ ID NO:70), chicken (SEQ ID NO:71), yellow baboon (SEQ ID NO:72), Sumatran orangutan (SEQ ID NO:73), dog (SEQ ID NO:74), and ovine (SEQ ID NO:75) u-PA polypeptides. For example, the human u-PA mRNA transcript is normally translated to form a 431 amino acid precursor protein (SEQ ID NO: 1) containing a 20 amino acid signal sequence at the N-terminus Met Arg Ala Leu Leu Ala Arg Leu Leu Leu Cys Val Leu Val Val Ser Asp Ser Lys Gly (amino acid residues 1-20 of SEQ ID NO:1). Thus, following transport to the ER and removal of the signal peptide, a 411 amino acid prourokinase polypeptide with a sequence of amino acids set forth in SEQ ID NO:3 is produced. As described in further detail below, prourokinase is a zymogen or proenzyme that is further processed by proteolytic cleavage to generate a two chain mature u-PA polypeptide. Thus, for example, with reference to mature u-PA (SEQ ID NO:3), the wild type chain activated u-PA contains a first chain (A chain), residues 1-158 linked by disulfide to residues 159-411 (B chain) via a disulfide bond between Cys148 (C97a chymotrypsin numbering) and Cys279 (C122 chymotrypsin numbering). Hence, in the modified u-PA polypeptides provided herein, when the protease domain is produced, it contains the replacement C122S, but when an activated form is produced that is a 2 chain form, the residue at 122 (chymotrypsin numbering) is C so that it forms a disulfide bond with another C, generally in the activation sequence (see discussion below and Example 15).

[0333] Human precursor u-PA has a sequence of amino acids set forth in SEQ ID NO: 1 and encoded by a sequence of nucleotides set forth in SEQ ID NO:7. Human pro-u-PA, also termed mature u-PA, lacking the signal sequence is set forth in SEQ ID NO:3. Two isoforms of human u-PA exist, as produced by alternative splicing. Isoform 1 of human u-PA is the canonical form described above set forth in SEQ ID NO:1. In isoform 2 of human u-PA, amino acids 1-29 of SEQ ID NO:1 are replaced with amino acids 1-12 of SEQ ID NO: 51, with the resulting protein containing 414 amino acids (set forth in SEQ ID NO:51). Allelic variants and other variants of human u-PA are known. For example, a uPA variant is known containing the amino acid modification V15L in the sequence of amino acids set forth in SEQ ID NO: 1. In another example, a modified u-PA polypeptide is known containing the amino acid modification C299S (C122S by chymotrypsin numbering) in the sequence of amino acids set forth in SEQ ID NO: 1 (corresponding to the sequence of amino acids set forth in SEQ ID NO: 4). Additional variants include those containing amino acid modifications P121L, D130G, C131W, I194M, K211Q, G366c and A410V in mature u-PA set forth in SEQ ID NO:3 (corresponding to amino acid modifications P141L, D150G, C151W, I214M, K231Q, G386C and A430V in SEQ ID NO:1).

[0334] u-PA polypeptides are synthesized and secreted as a single-chain zymogen molecules (also called prourokinases or single-chain urokinases), which are converted into active two-chain u-PAs by a variety of proteases including, for example, plasmin, kallikrein, cathepsin B, matriptase and nerve growth factor 7. Cleavage to generate the two chain form occurs between residues 158 and 159 (SEQ ID NO:3) in the human prourokinase sequence (corresponding to amino acid residues 178 and 179 in SEQ ID NO: 1). The two resulting chains are linked by a disulfide bond between Cys148 and Cys279, thereby forming the two-chain form of u-PA. The two chain form of u-PA also is called high molecular weight u-PA (HMW-u-PA). HMW-u-PA can be further processed into low molecular weight u-PA (LMW-u-PA) by cleavage of the A chain into a short chain A (A1, amino acids 136-157 of SEQ ID NO:3) and an amino terminal fragment. 21-178 linked disulfide to 179-411 linked via Cys corresponding to Cys148 and Cys279 (SEQ ID NO:3).

[0335] Urokinase-type plasminogen activator, u-PA, is a classical serine protease, containing a His-Asp-Ser catalytic triad, that cleaves a specific Arg-Val bond in plasminogen to form plasmin. Plasmin in turn can cleave u-PA at Lys158-Ile159 of SEQ ID NO:3 (corresponding to Lys15-Ile16 by chymotrypsin numbering) forming the two-chain form described above. The catalytic triad of human u-PA includes amino acids His204, Asp255 and Ser356 of SEQ ID NO:3 (corresponding to His57, Asp102 and Ser195 by chymotrypsin numbering). Residues Ser138 and Ser303 of the human uPA set forth in SEQ ID NO:3 are phosphorylated (Franco et al. (1997) J Cell Biol 137:779-791). Human u-PA contains O-linked glycosylation, e.g. fucosylation, at amino acid residue Thr18 of SEQ ID NO:3 (Buko et al. (1991) Proc Natl Acad Sci USA 88:3992-3996) and N-linked glycosylation at amino acid residue Asn302 of SEQ ID NO:3. Mature human u-PA contains intrachain disulfide bonds between residues C11-C19, C13-C31, C33-C42, C50-C131, C71-C113, C102-C126, C189-C205, C197-C268, C293-C362, C325-C341 and C352-C380 of SEQ ID NO:3 and an interchain disulfide bond between residues C148-C279 of SEQ ID NO:3.

[0336] The mature form of u-PA is a 411 residue protein (corresponding to amino acid residues 21 to 431 in the sequence of amino acids set forth in SEQ ID NO: 1 which is the precursor form containing a 20 amino acid signal peptide). u-PA contains three domains: the serine protease domain, the kringle domain and the growth factor domain. In the mature form of human u-PA, amino acids 1-158 represent the N-terminal A chain including a growth factor domain (amino acids 1-49), a kringle domain (amino acids 50-131), and an interdomain linker region (amino acids 132-158). Amino acids 159-411 represent the C-terminal serine protease domain or B chain. u-PA is synthesized and secreted as a single-chain zymogen molecule, which is converted into an active two-chain u-PA by a variety of proteases including, for example, plasmin, kallikrein, cathepsin B, and nerve growth factor-γ (gamma). Cleavage into the two chain form occurs between residues 158 and 159 in a mature u-PA sequence (corresponding to amino acid residues 178 and 179 in SEQ ID NO:3). The two resulting chains are kept together by a disulfide bond, thereby forming the two-chain form of u-PA.

[0337] Urokinase-type plasminogen activators contain three domains: a serine protease domain, a kringle domain and a growth factor domain. In the zymogen or proenzyme form of human u-PA, amino acids 1-158 of SEQ ID NO:3 represent the N-terminal A chain (or long chain A) including an epidermal growth factor domain (amino acids 1-49), a kringle domain (amino acids 50-131) and an interdomain linker region (amino acids 132-158) and amino acids 159-411 represent the catalytically active C-terminal serine protease domain or B chain. The epidermal growth factor domain is responsible for binding of u-PA to the cell surface-anchored u-PA receptor (uPAR). In the extracellular matrix, u-PA is tethered to the cell membrane by binding to the u-PA receptor. LMW-u-PA is proteolytically active but does not bind the u-PA receptor. The serine protease domain contains surface-exposed loops around residues 37, 60, 96, 110, 170 and 185, by chymotrypsin numbering. Upon activation or cleavage, the amino terminus inserts into a hydrophobic binding cleft of the catalytic protease domain forming hydrophobic interactions and a salt bridge to the side pocket of Asp194 which stabilizes the substrate binding pocket and oxyanion hole in a catalytically productive conformation. Asp194, according to chymotrypsin numbering, participates in hydrogen bonding to the main chain amino group of Gly142 and the main chain carbonyl group of Lys143 (Blouse et al. (2009) J Biol Chem 284:4647-4657). Conformational changes after cleavage involves four disordered regions of the activation domain, including the activation loop (residues 16-21), the autolysis loop (residues 142-152), the oxyanion stabilizing loop (residues 184-194) and the Si entrance frame (residues 216-223), all numbering according to chymotrypsin numbering (see, Blouse et al. (2009) J Biol Chem 284:4647-4657; Hedstrom (2002) Chem Rev 102:4501-4524; Huber and Bode (1978) Acc Chem Res 11:114-122; Madison et al. (1993) Science 262:419-421).

[0338] Structural determinants for u-PA are set forth in Table 4 below with numbering based on the numbering of mature chymotrypsin. The number underneath the Cys168-Cys182 and 60's loop column headings indicates the number of amino acids in the loop between the two amino acids and in the loop. The yes designation under the Cys191-Cys220 column headings indicates a disulfide bridge is present. These regions are variable within the family of chymotrypsin-like serine proteases and represent structural determinants in themselves. Modification of a u-PA polypeptide to alter any one or more of the amino acids in the S1-S4 pocket affects the specificity or selectivity of the u-PA polypeptide for a target substrate. The extended substrate specificity (P1-P4) reveals that u-PA has a high specificity for cleavage after P1 Arg, a preference for small amino acids at the P2 position, a preference for small polar amino acids (Thr and Ser) at the P3 position and no preference at the P4 position (Ke et al. (1997) J. Biol. Chem., 272:16603-16609; Harris et al. (2000) Proc Natl Acad Sci USA, 97:7754-7759).

TABLE 4
Structural Determinants for u-PA substrate
cleavage (chymotrypsin numbering)
Residues that Determine Specificity

| S4 | | | | | | | | | | S1 | | | |
|---|---|---|---|---|---|---|---|---|---|---|---|---|---|
| | | | | Cys | | | | | | | | | Cys |
| | | | | 168 | | | S2 | | | | | | 191 |
| | | | | Cys | S3 | | | | 60's | | | | Cys |
| 171 | 174 | 180 | 215 | 182 | 192 | 218 | 99 | 57 | loop | 189 | 190 | 226 | 220 |
| H | S | M | W | 15 | Q | R | H | H | 11 | D | S | G | yes |

[0339] 3. Function/activity

[0340] Urokinase-type plasminogen activator is a serine protease that catalyzes the hydrolysis of plasminogen into plasmin. Plasmin acts directly on the degradation of extracellular matrix proteins (Andreasen et al. (2000) Cell. Mol. Life Sci. 57:25-40). u-PA plays an important role in cell adhesion, migration and invasion, tissue remodeling and cancer (Blasi et al. (2002) Rev Mol Cell Biol 3:932; Andreasen et al. (2000) Cell. Mol. Life Sci. 57:25-40; Mondino and Blasi (2004) Trends Immunol 25:450; Ploug (2003) Curr Pharm Des 9:1499). Abnormal expression of u-PA has been associated with rheumatoid arthritis, allergic vasculitis, xeroderma pigmentosum and the invasive capacity of malignant tumors.

[0341] u-PA is regulated by the binding to the high affinity cell surface receptor uPAR. Binding of u-PA to uPAR increases the rate of plasminogen activation and enhances extracellular matrix degradation and cell invasion. The binary complex formed between uPAR and u-PA interacts with membrane-associated plasminogen to form higher order activation complexes that reduce the Km (i. e. kinetic rate constant of the approximate affinity for a substrate) for plasminogen activation (Bass et al. (2002) Biochem. Soc. Trans., 30: 189-194). Binding of u-PA to uPAR protects the protease from inhibition by the cognate inhibitor, i.e. PAI-1. This is because single chain u-PA normally present in plasma is not susceptible to inhibition by PAI-1, and any active u-PA in the plasma will be inhibited by PAI-1. Active u-PA that is receptor bound is fully available for inhibition by PAI-1, however, PAI-1 is unable to access the bound active molecule (Bass et al. (2002) Biochem. Soc. Trans., 30: 189-194). As a result, u-PA primarily functions on the cell surface and its functions are correlated with the activation of plasmin-dependent pericellular proteolysis.

[0342] u-PA also cleaves hepatocyte growth factor/scatter factor (HGF/SF), the latent form of membrane type 1 matrix metalloprotease (MT-SP1; matriptase), platelet derived growth factor C (PDGF-C), platelet derived growth factor D (PDGF-D), platelet derived growth factor DD (PDGF-DD) and other proteins (see, e.g., Hurst et al. (2012) Biochem J 441:909-918; Ustach and Kim (2005) Mol Cell Biol 5:6279-6288; Ehnman et al. (2009) Oncogene 28(4):534-544). Plasmin degrades fibrin clots, cleaves fibrin, fibronectin, thrombospondin, laminin and von Willebrand factor, proteolyzes mediators of complement system and activates collagenases. As such, plasmin participates in thrombolysis or extracellular matrix degradation, linking to plasmin to vascular diseases and cancer. For example, components of the plasminogen activation system have been observed to be highly expressed in malignant tumors. Hepatocyte growth factor/scatter factor regulates cell growth, cell motility and morphogenesis by binding of activated HGF to the HGF-receptor c-Met and its ability to stimulate mitogenesis, cell motility and matrix invasion link it to angiogenesis, tumorogenesis and tissue regeneration. Platelet derived growth factors regulate cell growth and division, and play a significant role in angiogenesis, which, when uncontrolled, is a characteristic of cancer. Once activated by proteolytic cleavage, PDGFs bind PGDF receptor tyrosine kinases leading to phosphorylation and a number of downstream signaling pathways involved in cancer. Due to the role of u-PA and the above mentioned proteins in vascular diseases the u-PA polypeptides provided herein are altered such that they reduced selectivity towards these proteins. By virtue of the changes in their specificity and activity the modified u-PA polypeptides provided herein exhibit reduced or no activity or no substantial activity on native substrates, and high activity, compared to unmodified u-PA on complement protein C3. As a result, at therapeutic dosages, the modified u-PA polypeptides provided herein specifically inhibit complement activation but have none or few side effects from cleavage of natural u-PA targets.

### C. COMPLEMENT INHIBITION BY TARGETING C3

[0343] The modified u-PA polypeptides provided herein exhibit increased specificity and/or activity for an inhibitory cleavage sequence in complement protein C3 compared to u-PA not containing the amino acid modifications (e.g. wild type human u-PA (see, SEQ ID NO: 1 or 3)) or the catalytic domain or protease domain thereof (see, SEQ ID NO:2) or corresponding unmodified u-PA polypeptides that include the replacement C122S, by chymotrypsin numbering. Replacement with S at residue 122 does not alter specificity or activity on C3, but reduces aggregation. Since C3 is involved in the 3 initiation pathways of complement (see, e.g., FIG. 1), targeting C3 by proteolytic inhibition provides a general and broad therapeutic target for inactivation of the complement cascade. Inactivation cleavage of C3 blocks terminal activity of complement as well as the alternative pathway amplification loop. All three pathways converge at C3 (see, e.g., FIG. 1). By virtue of the ability to inhibit complement activation, such modified u-PA polypeptides can be used to treat various diseases, conditions and pathologies associated with complement activation, such as inflammatory responses and autoimmune diseases. Complement activation is associated with the development of diseases and conditions by promoting local inflammation and damage to tissues caused in part by the generation of effector molecules and a membrane attack complex. In one example, such as in many autoimmune diseases, complement produces tissue damage because it is activated under inappropriate circumstances such as by antibody to host tissues. In other situations, complement can be activated normally, such as by septicemia, but still contributes to disease progression, such as in respiratory distress syndrome. Pathologically, complement can cause substantial damage to blood vessels (vasculitis), kidney basement membrane and attached endothelial and epithelial cells (nephritis), joint synovium (arthritis), and erythrocytes (hemolysis) if not adequately controlled. The role of C3 in complement activation is discussed in further detail below.

[0344] 1. Complement Protein C3 and its Role in Initiating Complement

[0345] The complement system involves over 30 soluble and cell-membrane bound proteins that function not only in the antibody-mediated immune response, but also in the innate immune response to recognize and kill pathogens such as bacteria, virus-infected cells, and parasites. Complement activation is initiated on pathogen surfaces through three distinct pathways: the classical pathway, the alternative pathway, and the lectin pathway. These pathways are distinct in that the components required for their initiation are different, but the pathways ultimately generate the same set of effector molecules (e.g., C3 convertases) which cleave complement protein C3 to trigger the formation of the membrane attack complex (MAC) (see, e.g., FIG. 1). Thus, complement protein C3 is an attractive target for a therapeutic since modulation of C3 results in modulation of various opsonins, anaphylatoxins and the MAC. Further, naturally occurring complement inhibitor proteins including factor H (FH), CR1, complement receptor Ig (CR1g), DAF and MCP inhibit at the C3 level.

[0346] There are three (3) pathways of complement activation (See, FIG. 1, which depicts these pathways). The pathways of complement are distinct; each relies on different molecules and mechanisms for initiation. The pathways are similar in that they converge to generate the same set of effector molecules, i.e., C3 convertases. In the classical and lectin pathways C4b2b acts as a C3 convertase; in the alternative pathway, C3bBb is a C3 convertase (see Table 5). Cleavage of C3 generates C3b, which acts as an opsonin and as the main effector molecule of the complement system for subsequent complement reactions, and C3a, which is a peptide mediator of inflammation. The addition of C3b to each C3 convertase forms a C5 convertase that generates C5a and C5b. C5a, like C3a, is a peptide mediator of inflammation. C5b mediates the “late” events of complement activation initiating the sequence of reactions culminating in the generation of the membrane attack complex (MAC). Although the three pathways produce different C3 and C5 convertases, all of the pathways produce the split products of C3 and C5 and form MAC. Alternatively, C3 can be cleaved and activated by extrinsic proteases, such as lysosomal enzymes and elastase (Markiewski and Lambris (2007) Am J Pathology 171:715-727; Ricklin and Lambris (2007) Nat Biotechnol 25:1265-1275).

TABLE 5
Complement Cascades

| | Alternative | | |
|---|---|---|---|
| | Pathway | Classical Pathway | Lectin Pathway |
| Activators | Pathogen surface | antigen-bound IgM | Pathogens via |
| | molecules | and IgG; non- | recognition of |
| | LPS, teichoic | immune molecules | carbohydrates on |
| | acid, zymosan | | surface |
| C3 convertase | C3bBb | C4b2b | C4b2b |
| C5 convertase | C3bBb3b | C4b2b3b | C4b2b3b |
| MAC | C5678poly9 | C5678poly9 | C5678poly9 |
| anaphylatoxins | C3a, C5a | C3a, C4a, C5a | C3a, C4a, C5a |

[0347] a. Classical Pathway

[0348] C1q is the first component of the classical pathway of complement. C1q is a calcium-dependent binding protein associated with the collectin family of proteins due to an overall shared structural homology (Malhotra et al., (1994) Clin Exp Immunol. 97(2):4-9; Holmskov et al. (1994) Immunol Today 15(2):67-74). Collectins, often called pattern recognition molecules, generally function as opsonins to target pathogens for phagocytosis by immune cells. In contrast to conventional collectins, such as MBL, the carboxy-terminal globular recognition domain of C1q does not have lectin activity but can serve as a “charged” pattern recognition molecule due to marked differences in the electrostatic surface potential of its globular domains (Gaboriaud et al. (2003) J. Biol. Chem. 278(47):46974-46982).

[0349] C1q initiates the classical pathway of complement in two different ways. First, the classical pathway is activated by the interaction of C1q with immune complexes (i. e. antigen-antibody complexes or aggregated IgG or IgM antibody) thus linking the antibody-mediated humoral immune response with complement activation. When the Fab portion (the variable region) of IgM or IgG binds antigen, the conformation of the Fc (constant) region is altered, allowing C1q to bind. C1q must bind at least 2 Fc regions to be activated. C1q, however, also is able to activate complement in the absence of antibody thereby functioning in the innate or immediate immune response to infection. Besides initiation by an antibody, complement activation also is achieved by the interaction of C1q with non-immune molecules such as polyanions (bacterial lipopolysaccharides, DNA, and RNA), certain small polysaccharides, viral membranes, C reactive protein (CRP), serum amyloid P component (SAP), and bacterial, fungal and virus membrane components.

[0350] C1q is part of the C1 complex which contains a single C1q molecule bound to two molecules each of the zymogens C1r and Cis. Binding of more than one of the C1q globular domains to a target surface (such as aggregated antibody or a pathogen), causes a conformational change in the (C1r:C1s)₂ complex which results in the activation of the C1r protease to cleave C1s to generate an active serine protease. Active C1 s cleaves subsequent complement components C4 and C2 to generate C4b and C2b, which together form the C3 convertase of the classical pathway. The C3 convertase cleaves C3 into C3b, which covalently attaches to the pathogen surface and acts as an opsonin, and C3a, which stimulates inflammation. Some C3b molecules associate with C4b2b complexes yielding C4b2b3b which is the classical cascade C5 convertase. Table 6 summarizes the proteins involved in the classical pathway of complement.

TABLE 6
Proteins of the Classical Pathway

| Native | Active | |
|---|---|---|
| Component | Form | Function of the Active Form |
| C1 | C1q | Binds directly to pathogen surfaces or |
| (C1q:(C1r:C1s)₂) | | indirectly to antibody bound to pathogens |
| | C1r | Cleaves C1s to an active protease |
| | C1s | Cleaves C4 and C2 |
| C4 | C4b | Binds to pathogen and acts as an opsonin; |
| | | binds C2 for cleavage by C1s |
| | C4a | Peptide mediator of inflammation |
| C2 | C2b | Active enzyme of classical pathway C3/C5 |
| | | convertase; cleaves C3 and C5 |
| | C2a | Precursor of vasoactive C2 kinin |
| C3 | C3b | Binds to pathogen surfaces and acts as an |
| | | opsonin; initiates amplification via the |
| | | alternative pathway; binds C5 for cleavage |
| | | by C2b |
| | C3a | Peptide mediator of inflammation |

[0351] b. Alternative Pathway

[0352] The alternative pathway is initiated by foreign pathogens in the absence of antibody. Initiation of complement by the alternative pathway occurs through the spontaneous hydrolysis of C3 into C3b. A small amount of C3b is always present in body fluids, due to serum and tissue protease activity. Host self-cells normally contain high levels of membrane sialic acid which inactivate C3b if it binds, but bacteria contain low external sialic acid levels and thereby bind C3b without inactivating it. C3b on pathogen surfaces is recognized by the protease zymogen Factor B. Factor B is cleaved by Factor D. Factor D is the only activating protease of the complement system that circulates as an active enzyme rather than as a zymogen, but since Factor B is the only substrate for Factor D the presence of low levels of an active protease in normal serum is generally safe for the host. Cleavage of Factor B by Factor D yields the active product Bb which can associate with C3b to form C3bBb, the C3 convertase of the alternative pathway. Similar to the classical pathway, the C3 convertase produces more C3b and C3a from C3. C3b covalently attaches to the pathogen surface and acts as an opsonin and additionally initiates the alternative pathway, while C3a stimulates inflammation. Some C3b joins the complex to form C3bBb3b, the alternative pathway C5 convertase. C3bBb3b is stabilized by the plasma protein properdin or Factor P which binds to microbial surfaces and stabilizes the convertase. Table 7 summarizes the proteins involved in the alternative pathway of complement.

TABLE 7
Proteins of the Alternative Pathway

| Native | Active | |
|---|---|---|
| Component | Form | Function of the Active Form |
| C3 | C3b | Binds to pathogen surface, binds Factor B for |
| | | cleavage by Factor D |
| Factor B | Ba | Small fragment of Factor B, unknown function |
| | Bb | Active enzyme of the C3 convertase and C5 |
| | | convertase |
| Factor D | D | Plasma serine protease, cleaves Factor B when |
| | | it is bound to C3b to Ba and Bb |
| Factor P | P | Plasma proteins with affinity for C3bBb |
| (properdin) | | convertase on bacterial cells; stabilizes convertase |

[0353] c. Lectin Pathway

[0354] The lectin pathway (also referred to as the MBL pathway) is initiated following recognition and binding of pathogen-associated molecular patterns (PAMPs; i.e. carbohydrates moieties) by lectin proteins. Examples of lectin proteins that activate the lectin pathway of complement include mannose binding lectin (MBL) and ficolins (i.e. L-ficolin, M-ficolin, and H-ficolin). MBL is a member of the collectin family of proteins and thereby exists as an oligomer of subunits composed of identical polypeptide chains each of which contains a cysteine-rich, a collagen-like, a neck, and a carbohydrate-recognition or lectin domain. MBL acts as a pattern recognition molecule to recognize carbohydrate moieties, particularly neutral sugars such as mannose or N-acetylglucosamine (GlcNAc) on the surface of pathogens via its globular lectin domain in a calcium-dependent manner. MBL also acts as an opsonin to facilitate the phagocytosis of bacterial, viral, and fungal pathogens by phagocytic cells. Additional initiators of the lectin pathway include the ficolins including L-ficolin, M-ficolin, and H-ficolin (see e.g., Liu et al. (2005) J Immunol. 175:3150-3156). Similar to MBL, ficolins recognize carbohydrate moieties such as, for example, N-acetyl glucosamine and mannose structures.

[0355] The activation of the alternative pathway by MBL or ficolins is analogous to activation of the classical pathway by C1q whereby a single lectin molecule interacts with two protease zymogens. In the case of the lectin proteins, the zymogens are MBL-associated serine proteases, MASP-1 and MASP-2, which are closely homologous to the C1r and C s zymogens of the classical pathway. Upon recognition of a PAMP by a lectin protein, such as for example by binding to a pathogen surface, MASP-1 and MASP-2 are activated to cleave C4 and C2 to form the MBL cascade C3 convertase. C3b then joins the complex to form the MBL cascade C5 convertase. MASP activation is implicated not only in responses to microorganisms, but in any response that involves exposing neutral sugars, including but not limited to tissue injury, such as that observed in organ transplants. Like the alternative cascade, the MBL cascade is activated independent of antibody; like the classical cascade, the MBL cascade utilizes C4 and C2 to form C3 convertase. Table 8 summarizes the proteins involved in the lectin pathway of complement.

TABLE 8
Proteins of the Lectin Pathway

| Native | | |
|---|---|---|
| Component | Active Form | Function of the Active Form |
| MBL | MBL | Recognizes PAMPs, such as on pathogen |
| | | surfaces (e.g., via recognition of |
| | | carbohydrates) |
| Ficolins | L-Ficolin; M- | Recognizes PAMPs, such as on pathogen |
| | Ficolin, or H- | surfaces (e.g., via recognition of |
| | Ficolin | carbohydrates) |
| MASP-1 | MASP-1 | Cleaves C4 and C2 |
| MASP-2 | MASP-2 | Cleaves C4 and C2 |

[0356] d. Complement-Mediated Effector functions

[0357] Regardless of which initiation pathway is used, the end result is the formation of activated fragments of complement proteins (e.g. C3a, C4a, and C5a anaphylatoxins and C5b-9 membrane attack complexes), which act as effector molecules to mediate diverse effector functions. The recognition of complement effector molecules by cells for the initiation of effector functions (e.g. chemotaxis and opsonization) is mediated by a diverse group of complement receptors. The complement receptors are distributed on a wide range of cell types including erythrocytes, macrophages, B cells, neutrophils, and mast cells. Upon binding of a complement component to the receptor, the receptors initiate an intracellular signaling cascade resulting in cell responses such as stimulating phagocytosis of bacteria and secreting inflammatory molecules from the cell. For example, the complement receptors CR1 and CR2 which recognize C3b, C4b, and their products are important for stimulating chemotaxis. CR3 (CD11b/CD18) and CR4 (CD11c/CD18) are integrins that are similarly important in phagocytic responses but also play a role in leukocyte adhesion and migration in response to iC3b. The C5a and C3a receptors are G protein-coupled receptors that play a role in many of the pro-inflammatory-mediated functions of the C5a and C3a anaphylatoxins. For example, receptors for C3a, C3aR, exist on mast cells, eosinophils, neutrophils, basophils and monocytes and are directly involved in the pro-inflammatory effects of C3a.

[0358] Thus, through complement receptors, these complement effector molecule fragments mediate several functions including leukocyte chemotaxis, activation of macrophages, vascular permeability and cellular lysis (Frank, M. and Fries, L. Complement. In Paul, W. (ed.) Fundamental Immunology, Raven Press, 1989). A summary of some effector functions of complement products are listed in Table 9.

TABLE 9
Complement Effector Molecules and Functions

| Product | Activity |
|---|---|
| C2b (prokinin) | accumulation of body fluid |
| C3a (anaphylatoxin) | basophil and mast cell degranulation; enhanced |
| | vascular permeability; smooth muscle |
| | contraction; Induction of suppressor T cells |
| C3b and its products | opsonization; phagocyte activation |
| C4a (anaphylatoxin) | basophil & mast cell activation; smooth muscle |
| | contraction; enhanced vascular permeability |
| C4b | opsonization |
| C5a (anaphylatoxin; | basophil & mast cell activation; enhanced |
| chemotactic factor) | vascular permeability; smooth muscle |
| | contraction; chemotaxis; neutrophil aggregation; |
| | oxidative metabolism stimulation; stimulation of |
| | leukotriene release; induction of helper T-cells |
| C5b67 | chemotaxis; attachment to other cell membranes |
| | and lysis of bystander cells |
| C5b6789 (C5b-9) | lysis of target cells |

[0359] i. Complement-Mediated Lysis: Membrane Attack Complex

[0360] The final step of the complement cascade by all three pathways is the formation of the membrane attack complex (MAC) (FIG. 1). C5 can be cleaved by any C5 convertase into C5a and C5b. C5b combines with C6 and C7 in solution, and the C5b67 complex associates with the pathogen lipid membrane via hydrophobic sites on C7. C8 and several molecules of C9, which also have hydrophobic sites, join to form the membrane attack complex, also called C5b6789 or C5b-9. C5b-9 forms a pore in the membrane through which water and solutes can pass, resulting in osmotic lysis and cell death. If complement is activated on an antigen without a lipid membrane to which the C5b67 can attach, the C5b67 complex can bind to nearby cells and initiate bystander lysis. A single MAC can lyse an erythrocyte, but nucleated cells can endocytose MAC and repair the damage unless multiple MACs are present. Gram negative bacteria, with their exposed outer membrane and enveloped viruses, are generally susceptible to complement-mediated lysis. Less susceptible are Gram positive bacteria, whose plasma membrane is protected by their thick peptidoglycan layer, bacteria with a capsule or slime layer around their cell wall, or viruses which have no lipid envelope. Likewise, the MAC can be disrupted by proteins that bind to the complex before membrane insertion such as Streptococcal inhibitor of complement (SIC) and clusterin. Typically, the MAC helps to destroy Gram-negative bacteria as well as human cells displaying foreign antigens (virus-infected cells, tumor cells, etc.) by causing their lysis and also can damage the envelope of enveloped viruses.

[0361] ii. Inflammation

[0362] Inflammation is a process in which blood vessels dilate and become more permeable, thus enabling body defense cells and defense chemicals to leave the blood and enter the tissues. Complement activation results in the formation of several proinflammatory mediators such as C3a, C4a and C5a. The intact anaphylatoxins in serum or plasma are quickly converted into the more stable, less active C3a-desArg, C4a-desArg, or C5a-desArg forms, by carboxypeptidase N. C3a, C4a and C5a, and to a lesser extent their desArg derivatives, are potent bioactive polypeptides, termed anaphylatoxins because of their inflammatory activity. Anaphylatoxins bind to receptors on various cell types to stimulate smooth muscle contraction, increase vascular permeability, and activate mast cells to release inflammatory mediators. C5a, the most potent anaphylatoxin, primarily acts on white blood cells, particularly neutrophils. C5a stimulates leukocyte adherence to blood vessel walls at the site of infection by stimulating the increased expression of adhesion molecules so that leukocytes can squeeze out of the blood vessels and into the tissues, a process termed diapedesis. C5a also stimulates neutrophils to produce reactive oxygen species for extracellular killing, proteolytic enzymes, and leukotrienes. C5a also can further amplify the inflammatory process indirectly by inducing the production of chemokines, cytokines, and other proinflammatory mediators. C5a also interacts with mast cells to release vasodilators such as histamine so that blood vessels become more permeable. C3a also interacts with white blood cells, with major effects on eosinophils suggesting a role for C3a in allergic inflammation. C3a induces smooth muscle contraction, enhances vascular permeability, and causes degranulation of basophils and release of histamine and other vasoactive substances. C2a can be converted to C2 kinin, which regulates blood pressure by causing blood vessels to dilate.

[0363] Although technically not considered an anaphylatoxin, iC3b, an inactive derivative of C3b, functions to induce leukocyte adhesion to the vascular endothelium and induce the production of the pro-inflammatory cytokine IL-1 via binding to its cell surface integrin receptors. C5b-9 also indirectly stimulates leukocyte adhesion, activation, and chemotaxis by inducing the expression of cell adhesion molecules such as E-selectin, and inducing interleukin-8 secretion (Bhole et al. (2003) Crit Care Med 31(1):97-104). C5b-9 also stimulates the release of secondary mediators that contribute to inflammation, such as for example, prostaglandin E₂, leukotriene B₄, and thromboxane.

[0364] Conversion of the human complement components C3 and C5 to yield their respective anaphylatoxin products has been implicated in certain naturally occurring pathologic states including: autoimmune disorders such as systemic lupus erythematosus, rheumatoid arthritis, malignancy, myocardial infarction, Purtscher's retinopathy, sepsis and adult respiratory distress syndrome. Increased circulating levels of C3a and C5a have been detected in certain conditions associated with iatrogenic complement activation such as: cardiopulmonary bypass surgery, renal dialysis, and nylon fiber leukaphoresis.

[0365] iii. Chemotaxis

[0366] Chemotaxis is a process by which cells are directed to migrate in response to chemicals in their environment. In the immune response, a variety of chemokines direct the movement of cells, such as phagocytic cells, to sites of infection. For example, C5a is the main chemotactic factor for circulating neutrophils, but also can induce chemotaxis of monocytes. Phagocytes move towards increasing concentrations of C5a and subsequently attach, via their CR1 receptors, to the C3b molecules attached to the antigen. The chemotactic effect of C5a, observed with basophils, eosinophils, neutrophils, and mononuclear phagocytes, is active at concentrations as low as 10⁻¹⁰ M.

[0367] iv. Opsonization

[0368] An important action of complement is to facilitate the uptake and destruction of pathogens by phagocytic cells. This occurs by a process termed opsonization whereby complement components bound to target bacteria interact with complement receptors on the surface of phagocytic cells such as neutrophils or macrophages. In this instance, the complement effector molecules are termed opsonins. Opsonization of pathogens is a major function of C3b and C4b. iC3b also functions as an opsonin. C3a and C5a increase the expression of C3b receptors on phagocytes and increase their metabolic activity.

[0369] C3b and, to a lesser extent, C4b help to remove harmful immune complexes from the body. C3b and C4b attach the immune complexes to CR1 receptors on erythrocytes. The erythrocytes then deliver the complexes to fixed macrophages within the spleen and liver for destruction. Immune complexes can lead to a harmful Type III hypersensitivity.

[0370] v. Activation of the Humoral Immune Response

[0371] Activation of B cells requires ligation of the B cell receptor (BCR) by antigen. It has been shown, however, that complement plays a role in lowering the threshold for B cell responses to antigen by up to 1000-fold. This occurs by the binding of C3d or C3dg, complement products generated from the breakdown fragments of C3, to CR2 receptors on B-lymphocytes which can co-ligate with the BCR. Co-ligation occurs when antigenic particles, such as for example immune complexes, opsonized with C3d bind the CR2 receptor via C3d as well as the BCR through antigen. Co-ligation of antigen complexes also can occur when C3d binds to antigens enhancing their uptake by antigen presenting cells, such as dendritic cells, which can then present the antigen to B cells to enhance the antibody response. Mice deficient in CR2 display defects in B cell function that result in reduced levels of natural antibody and impaired humoral immune responses.

[0372] 2. C3 Structure and Function

[0373] The variant u-PA polypeptides provided herein cleave complement protein C3 or its proteolytic fragments thereby inhibiting complement. Human complement protein C3 (Uniprot Accession No. P01024) is a 1663 amino acid single chain pre-proprotein having an amino acid sequence set forth in SEQ ID NO:47. The protein is encoded by a 41 kb gene located on chromosome 19 (nucleotide sequence set forth in SEQ ID NO:46). The pre-proprotein contains a 22 amino acid signal peptide (amino acids 1-22 of SEQ ID NO:47) and a tetra-arginine sequence (amino acids 678-681 of SEQ ID NO:47) that is removed by a furin-like enzyme resulting in formation of a mature two chain protein containing a beta chain (amino acids 23-667 of SEQ ID NO:47) and an alpha chain (amino acids 672-1663 of SEQ ID NO:47), that are linked by an interchain disulfide bond between amino acid residues Cys559 and Cys816. The mature 2 chain protein has a sequence of amino acids set forth in SEQ ID NO:77.

[0374] During the complement cascade, complement protein C3 is further processed by proteolytic cleavage to form various C3 proteolytic fragments. As described above, all three complement initiation pathways converge on the C3 convertases C4b2b and C3bBb. C3 convertases cleave C3 between residues 748 and 749 of SEQ ID NO:47 (see Table 10 below) generating the anaphylatoxin C3a (amino acids 672-748 of SEQ ID NO:47) and the opsonin C3b (C3b alpha′ chain; amino acids 749-1663 of SEQ ID NO:47). C3a is involved in inflammation and C3b forms the C5 convertases ultimately leading to C5a anaphylatoxin and the MAC. The variant u-PA polypeptides provided herein inhibit complement, and as such, do not cleave C3 at this GLAR cleavage site.

[0375] C3b has binding sites for various complement components including C5, properdin (P), factors H, B and I, complement receptor 1 (CR1) and the membrane co-factor protein (MCP) (see Sahu and Lambris (2001) Immunological Reviews 180:35-48). Binding of Factor I, a plasma protease, in the presence of cofactors H, CR1 and MCP results in inactivation of C3b whereas binding of factors B and P in the presence of factor D results in amplification of C3 convertase and initiation of MAC. Factor I cleaves C3b in the presence of cofactors between residues 1303-1304, 1320-1321 and 954-955 of SEQ ID NO:47 (see Table 10 below) generating fragments iC3b (amino acids 749-1303 of SEQ ID NO:47) and C3f (amino acids 1304-1320 of SEQ ID NO:47). Factor I subsequently cleaves iC3b generating C3c (C3c alpha′ chain Fragment 1; amino acids 749-954 of SEQ ID NO:47) and C3dg (amino acids 955-1303 of SEQ ID NO:47). The end result is that C3b is permanently inactivated (see Sahu and Lambris (2001) Immunological Reviews 180:35-48). Since Factor I inactivates C3b, the Factor I cleavage sites are candidates for cleavage by the variant u-PA polypeptides provided herein. Additional C3b proteolytic fragments include C3g (amino acids 955-1001 of SEQ ID NO:47), C3d (amino acids 1002-1303 of SEQ ID NO:47), and C3c alpha′ chain Fragment 2 (amino acids 1321-1663 of SEQ ID NO:47). Cleavage sequences in complement protein C3 are set forth in Table 10 below, which lists the P4-P1 residues, the amino acid residues of the cleavage site (P1-P1′ site) and the protease responsible for cleavage. The modified u-PA polypeptides provided herein do not cleave at these sites.

TABLE 10
Complement Protein C3 Cleavage Sequences

| | Cleavage Site | | |
|---|---|---|---|
| | (in SEQ ID NO: 47) | | |
| P4-P1 Residues | Between residues | Protease | SEQ ID NO. |
| GLAR | 748-749 | C3 convertase | 78 |
| RLGR | 954-955 | Factor I | 79 |
| LPSR | 1303-1304 | Factor I | 80 |
| SLLR | 1320-1321 | Factor I | 81 |

[0376] a. C3a

[0377] C3a (amino acids 672-748 of SEQ ID NO:47) is an anaphylatoxin that is involved in inflammation, basophil and mast cell degranulation, enhanced vascular permeability, smooth muscle contraction and induction of suppressor T cells.

[0378] b. C3b

[0379] C3b (amino acids 749-1663 of SEQ ID NO:47) has various roles in the complement cascade. C3b is an opsonin that facilitates the uptake and destruction of pathogens by phagocytic cells. Additionally, C3b combines with the C3 convertases to generate the C5 convertases which activate complement protein C5 thereby generating the C5a anaphylatoxin and C5b, which combines with C6, C7, C8 and C9 to form the membrane attack complex. Furthermore, as described in section 1b above, C3b is involved in the alternative pathway of complement initiation. C3b is regulated by complement regulatory protein Factor I, a plasma protease which degrades C3b into various fragments, including iC3b, C3c, C3d, C3f and C3dg, thereby permanently inactivating C3b.

[0380] C3b plays a critical role in complement-mediated effector functions by virtue of its ability to bind to the C3 convertases C4b2b and C3bBb thereby generating the C5 convertases C4b2b3b and C3bBb3b. The C5 convertases cleave the zymogen C5 into its active fragments, namely the C5a anaphylatoxin and C5b. C5a is involved in chemotaxis and inflammation and C5b is involved in formation of MAC.

[0381] c. Inhibitors of C3b

[0382] C3b has binding sites for various complement components including C5, properdin (P), factors H, B and I, complement receptor 1 (CR1) and the membrane co-factor protein (MCP) (see Sahu and Lambris (2001) Immunological Reviews 180:35-48). Binding of factor I, a plasma protease, in the presence of cofactors H, CR1 and MCP results in inactivation of C3b whereas binding of factors B and P in the presence of factor D results in amplification of C3 convertase and initiation of MAC. Factor I cleaves C3b in the presence of cofactors between residues 1303-1304, 1320-1321 and 954-955 of SEQ ID NO:47 generating fragments iC3b (amino acids 749-1303 of SEQ ID NO:47) and C3f (amino acids 1304-1320 of SEQ ID NO:47). Although technically not considered an anaphylatoxin, iC3b, an inactive derivative of C3b, functions to induce leukocyte adhesion to the vascular endothelium and induce the production of the pro-inflammatory cytokine IL-1 via binding to its cell surface integrin receptors. The protein iC3b functions as an opsonin. Factor I subsequently cleaves iC3b generating fragments C3c (C3c alpha′ chain Fragment 1: amino acids 749-954 of SEQ ID NO:47 and C3c alpha′ chain Fragment 2: amino acids 1321-1663 of SEQ ID NO:47) and C3dg (amino acids 955-1303 of SEQ ID NO:47). The end result is that C3b is permanently inactivated (see Sahu and Lambris (2001) Immunological Reviews 180:35-48). C3dg can be further cleaved to generate fragments C3g (amino acids 955-1001 of SEQ ID NO: 47) and C3d (amino acids 1002-1303 of SEQ ID NO:47).

### D. MODIFIED U-PA POLYPEPTIDES THAT CLEAVE C3

[0383] Provided herein are modified or variant urokinase-type plasminogen activator (u-PA) polypeptides. Also provided are conjugates, such as fusion proteins, that contain modified u-PA polypeptides, so that resulting activated forms thereof cleave C3. The modified u-PA polypeptides provided herein exhibit altered activities or properties compared to a wild-type, native or reference u-PA polypeptide. For example, the u-PA polypeptides provided herein contain modifications compared to a wild-type, native or reference u-PA polypeptide set forth in any of SEQ ID NOS: 1-6, or in a polypeptide that has at least 65%, 70%, 75%, 80%, 85%, 86%, 87%, 88%, 89%, 90%, 91%, 92%, 93%, 94%, 95%, 96%, 97%, 98%, or 99%, particularly at least 95% sequence identity to any of SEQ ID NOS:1-6, such as the reference u-PA protease domain set forth in SEQ ID NO:5. Included among the modified u-PA polypeptides provided herein are u-PA polypeptides that alter (inhibit) complement activation by effecting inhibitory cleavage of complement protein C3. Among the modified u-PA polypeptides provided herein are those that effect inhibitory cleavage of complement protein C3. Included are those that effect inhibitory cleavage of C3 with greater activity or specificity, K_{cat}/Kₘ, compared to a corresponding form of the u-PA that does not contain the modification (the replacement, deletion and/or insertion) or compared to the corresponding form of unmodified u-PA whose sequences are set forth in any of SEQ ID NOs: 1-6. The modified u-PA polypeptides also can have decreased specificity and/or and selectivity for substrates and targets cleaved or recognized by unmodified u-PA, including cleavage of plasminogen and/or binding to uPAR, compared to the corresponding u-PA polypeptide not containing the amino acid modification(s).

[0384] The modified u-PA polypeptides provided herein inhibit or inactivate complement through inhibitory or inactivation cleavage of complement protein C3. The modified u-PA polypeptides provided herein inhibit or inactivate complement by cleaving complement protein C3 at a cleavage site that results in inhibition or inactivation of C3. Inactivation or inhibition cleavage of complement protein C3 can be at any sequence in C3 so long as the resulting cleavage of C3 results in inactivation or inhibition of activation of complement. Since the modified u-PA polypeptides provided herein inhibit complement activation, the modified u-PA polypeptides do not effect cleavage of the zymogen form of C3 to generate the C3a and C3b activated fragments. Thus, modified u-PA polypeptides provided herein do not cleave C3 between residues 748-749 of SEQ ID NO: 47, which would result in generation of C3a and C3b. Inhibition or inactivation cleavage sites of complement protein C3 can be empirically determined or identified. If necessary, a modified u-PA polypeptide can be tested for its ability to inhibit complement as described in section E below and as exemplified in the Examples.

[0385] The modified u-PA polypeptides provided herein catalyze inhibitory or inactivation cleavage of complement protein C3. The modified u-PA polypeptides provided herein cleave complement protein C3 at any cleavage sequence as long as the resulting C3 fragments are inactive, or unable to activate a complement-mediated effector function. The modified u-PA polypeptides provided herein have altered (i. e., decreased) specificity and/or selectivity for natural targets of u-PA, including plasminogen and uPAR. In one example, the modified u-PA polypeptides provided herein have reduced specificity for cleavage of plasminogen. In another example, the modified u-PA polypeptides provided herein have reduced selectivity for binding to uPAR. In some examples, the modified u-PA polypeptides provided herein have reduced specificity for cleavage of plasminogen and reduced selectivity for binding to uPAR. In other examples, the modified u-PA polypeptides provided herein have increased specificity for cleavage of complement protein C3 and decreased specificity for cleavage of plasminogen. In other examples, the modified u-PA polypeptides provided herein have increased selectivity for complement protein C3 and decreased selectivity for plasminogen and/or uPAR.

[0386] The modified u-PA polypeptides provided herein and described in the examples are, for example, isolated protease domains of u-PA. Smaller portions thereof that retain protease activity also are contemplated. The modified u-PA polypeptides provided herein are mutants of the protease domain of u-PA, particularly modified u-PA polypeptides in which the Cys residue in the protease domain that is free (i.e., does not form disulfide linkages with any other Cys residue in the protein) is substituted with another amino acid substitution, preferably with a conservative amino acid substitution or a substitution that does not eliminate the activity, such as, for example, substitution with Serine, and modified u-PA polypeptides in which a glycosylation site(s) is eliminated. Modified u-PA polypeptides in which other conservative amino acid substitutions in which catalytic activity is retained are also contemplated (see e.g., Table 3, for exemplary amino acid substitutions).

[0387] The modified u-PA polypeptides provided herein contain one or more amino acid modifications such that they cleave complement protein C3 in a manner that results in inactivation or inhibition of complement. The modifications can be a single amino acid modification, such as single amino acid replacements (substitutions), insertions or deletions, or multiple amino acid modifications, such as multiple amino acid replacements, insertions or deletions. Exemplary modifications are amino acid replacements, including single or multiple amino acid replacements. The amino acid replacement can be a conservative substitution, such as set forth in Table 3, or a non-conservative substitution, such as any described herein. Modified u-PA polypeptides provided herein can contain at least or 1, 2, 3, 4, 5, 6, 7, 8, 9, 10, 11, 12, 13, 14, 15, 16, 17, 18, 19, 20, or more modified positions compared to the u-PA polypeptide not containing the modification.

[0388] The modifications described herein can be made in any u-PA polypeptide. For example, the modifications are made in a human u-PA polypeptide having a sequence of amino acids including or set forth in SEQ ID NO:1, SEQ ID NO:2, SEQ ID NO:3, SEQ ID NO:4, SEQ ID NO: 5 or SEQ ID NO:6, or allelic variants thereof; a mouse u-PA polypeptide having a sequence of amino acids including or set forth in SEQ ID NOS:52 or 66; a rat u-PA polypeptide having a sequence of amino acids including or set forth in SEQ ID NOS:53 or 67; a cow u-PA polypeptide having a sequence of amino acids including or set forth in SEQ ID NOS:54 or 68; a porcine u-PA polypeptide having a sequence of amino acids including or set forth in SEQ ID NOS:55 or 69; a rabbit u-PA polypeptide having a sequence of amino acids including or set forth in SEQ ID NOS:56 or 70; a chicken u-PA polypeptide having a sequence of amino acids including or set forth in SEQ ID NOS:57 or 71; a yellow baboon u-PA polypeptide having a sequence of amino acids including or set forth in SEQ ID NOS:58 or 72; a Sumatran orangutan u-PA polypeptide having a sequence of amino acids including or set forth in SEQ ID NOS:59 or 73; a dog u-PA polypeptide having a sequence of amino acids including or set forth in SEQ ID NOS:60 or 74; a ovine u-PA polypeptide having a sequence of amino acids including or set forth in SEQ ID NOS:61 or 75; a marmoset u-PA polypeptide having a sequence of amino acids including or set forth in SEQ ID NO:62; a rhesus monkey u-PA polypeptide having a sequence of amino acids including or set forth in SEQ ID NO:63; a northern white-cheeked gibbon u-PA polypeptide having a sequence of amino acids including or set forth in SEQ ID NO:64; and a chimpanzee u-PA polypeptide having a sequence of amino acids including or set forth in SEQ ID NOS:65; or in sequence variants or catalytically active fragments that exhibit at least 65%, 70%, 75%, 80%, 85%, 86%, 87%, 88%, 89%, 90%, 91%, 92%, 93%, 94%, 95%, 96%, 97%, 98%, 99% or more sequence identity to any of SEQ ID NOS:1-6 and 52-75.

[0389] The modified u-PA polypeptides provided herein can be modified in any region or domain of a u-PA polypeptide provided herein, as long as the modified u-PA polypeptide retains its ability to effect inactivation or inhibitory cleavage of complement protein C3. The modified u-PA polypeptides provided herein can be single-chain or two chain polypeptides, species variants, allelic variants, isoforms, or catalytically active fragments thereof, such as, for example, the protease domain thereof. The u-PA polypeptides provided herein can be full length or truncated u-PA polypeptides. The modified u-PA polypeptides provided herein can be the protease domain of u-PA or a modified form of the protease domain of u-PA. Also contemplated for use herein are zymogen, precursor or mature forms of modified u-PA polypeptides, provided the u-PA polypeptides retain their ability to effect inhibitory or inactivation cleavage of complement protein C3. Modifications in a u-PA polypeptide also can be made to a u-PA polypeptide that also contains other modifications, including modifications of the primary sequence and modifications not in the primary sequence of the polypeptide. For example, a modification described herein can be in a u-PA polypeptide that is a fusion polypeptide or chimeric polypeptide. The modified u-PA polypeptides provided herein also include polypeptides that are conjugated to a polymer, such as a PEG reagent.

[0390] For purposes herein, reference to positions and amino acids for modification, including amino acid replacement or replacements, herein are with reference to the u-PA polypeptide set forth in any of SEQ ID NOs: 1-6. It is within the level of one of skill in the art to make any of the modifications provided herein in another u-PA polypeptide by identifying the corresponding amino acid residue in another u-PA polypeptide, such as the u-PA polypeptide set forth in any of SEQ ID NOs: 1-6 or a variant thereof that exhibits at least 70%, 75%, 80%, 85%, 86%, 87%, 88%, 89%, 90%, 91%, 92%, 93%, 94%, 95%, 96%, 97%, 98%, 99% or more sequence identity to a u-PA polypeptide set forth in any of SEQ ID NOs: 1-6. Corresponding positions in another u-PA polypeptide can be identified by alignment of the u-PA polypeptide with the reference a u-PA polypeptide set forth in any of SEQ ID NOs: 1-6. For purposes of modification (e.g. amino acid replacement), the corresponding amino acid residue can be any amino acid residue, and need not be identical to the residue set forth in any of SEQ ID NOs: 1-6. Typically, the corresponding amino acid residue identified by alignment with, for example, residues in SEQ ID NO:5 is an amino acid residue that is identical to SEQ ID NO:5, or is a conservative or semi-conservative amino acid residue thereto. It also is understood that the exemplary replacements provided herein can be made at the corresponding residue in a u-PA polypeptide, such as the protease domain of u-PA, so long as the replacement is different than exists in the unmodified form of the u-PA polypeptide, such as the protease domain of u-PA. Based on this description and the description elsewhere herein, it is within the level of one of skill in the art to generate a modified u-PA polypeptide containing any one or more of the described mutations, and test each for a property or activity as described herein.

[0391] The modified u-PA polypeptides provided herein alter complement activity by proteolysis-mediated inhibition or inactivation of complement protein C3. Further, the modified u-PA polypeptides provided herein have decreased specificity for cleavage of plasminogen and/or binding to uPAR. For example, the modified u-PA polypeptides provided herein exhibit less than 100% of the wild type activity of a u-PA polypeptide for cleavage of plasminogen, such as less than 90%, 80%, 70%, 60%, 50%, 40%, 30%, 20%, 10% or less of the activity for cleavage of plasminogen of a wild type or reference u-PA polypeptide, such as the corresponding polypeptide not containing the amino acid modification. In another example, the modified u-PA polypeptides provided herein exhibit less than 100% of the wild type binding activity of a u-PA polypeptide for uPAR, such as less than 90%, 80%, 70%, 60%, 50%, 40%, 30%, 20%, 10% or less of the activity for binding to uPAR of a wild type or reference u-PA polypeptide, such as the corresponding polypeptide not containing the amino acid modification.

[0392] Also provided herein are nucleic acid molecules that encode any of the modified u-PA polypeptides provided herein. In some examples, the encoding nucleic acid molecules also can be modified to contain a heterologous signal sequence to alter (e.g. increased) expression and secretion of the polypeptide. The modified u-PA polypeptides and encoding nucleic acid molecules provided herein can be produced or isolated by any method known in the art including isolation from natural sources, isolation of recombinantly produced proteins in cells, tissues and organisms, and by recombinant methods and by methods including in silico steps, synthetic methods and any methods known to those of skill in the art. The modified polypeptides and encoding nucleic acid molecules provided herein can be produced by standard recombinant DNA techniques known to one of skill in the art. Any method known in the art to effect mutation of any one or more amino acids in a target protein can be employed. Methods include standard site-directed or random mutagenesis of encoding nucleic acid molecules, or solid phase polypeptide synthesis methods. For example, nucleic acid molecules encoding a u-PA polypeptide can be subjected to mutagenesis, such as random mutagenesis of the encoding nucleic acid, error-prone PCR, site-directed mutagenesis, overlap PCR, gene shuffling, or other recombinant methods. The nucleic acid encoding the polypeptides can then be introduced into a host cell to be expressed heterologously. Hence, also provided herein are nucleic acid molecules encoding any of the modified polypeptides provided herein. In some examples, the modified u-PA polypeptides are produced synthetically, such as using solid phase or solutions phase peptide synthesis. The nucleic acid molecules can be provided in gene therapy vectors, such as AAV or adenovirus vectors, for expression of the encoded modified u-PA polypeptide in vivo, such as in the eye or for systemic administration. The encoded u-PA polypeptide can be a full-length polypeptide or a protease domain or other form that is active or that can be activated.

[0393] The u-PA polypeptides provided herein have been modified to have increased specificity and/or selectivity for cleavage of an inhibitory or inactivation cleavage sequence of complement protein C3. u-PA polypeptides can be modified using any method known in the art for modification of proteins. Such methods include site-directed and random mutagenesis. Assays such as the assays for biological function of complement activation provided herein and known in the art can be used to assess the biological function of a modified u-PA polypeptide to determine if the modified u-PA polypeptide targets complement protein C3 for cleavage and inactivation. Exemplary methods to identify a u-PA polypeptide and the modified u-PA polypeptides are provided herein.

[0394] 1. Exemplary Modified u-PA Polypeptides

[0395] Provided herein are modified u-PA polypeptides that contain one or more, including 2, 3, 4, 5, 6, 7, 8, 9, 10, 11, 12, 13, 14, 15 and more amino acid modifications in a u-PA polypeptide and that cleave complement protein C3 such that complement is inhibited or inactivated. Modifications are in the primary amino acid sequence, and include replacements, deletions and insertions of amino acid residues. The modification alter the specificity/activity of the u-PA polypeptide, when in an active form. The modified u-PA polypeptides herein are selected to recognize and cleave a target site in a complement protein, particularly C3 to inactivate it. They also can be further modified and screened to have reduced specificity/activity on in vivo substrates, such as plasminogen. They can be selected and identified by any suitable protease screen method. The modified u-PA polypeptides herein initially were identified using the screening method described in U.S. Pat. No. 8,211,428, in which a library of modified proteases are reacted with a cognate or other inhibitory serpin that is modified to include a target sequence in the reactive site loop to capture modified proteases that would cleave such target.

[0396] Modified u-PA polypeptides provided herein display increased activity or specificity or K_{cat}/Kₘ for complement protein C3 at a site that inactivates C3, and also can have reduced activity or specificity for plasminogen and/or display increased selectivity, specificity and/or activity for a target site complement protein C3, whereby the modified u-PA polypeptide inactivates C3. The modified u-PA polypeptides exhibit increased activity for cleaving and inactivating C3 compared to the corresponding form of wild-type or wild-type with the replacement C122S (by chymotrypsin numbering). In particular, the protease domain of the modified u-PA polypeptide exhibits increased inactivation cleavage activity of C3 compared to the u-PA protease domain of SEQ ID NO:5 (u-PA protease domain with C122S). The increase in activity can be 10%, 20%, 50%, 100%, 1-fold, 2-fold, 3-fold, 4, 5, 6, 7, 8, 9, 10-fold and more compared to the unmodified u-PA.

[0397] The modified u-PA polypeptide can have reduced activity for a native substrate, such as plasminogen. For example, the modified u-PA polypeptides can exhibit 0 to 99% of the u-PA activity of a wild type or reference u-PA polypeptide, such as the u-PA polypeptide set forth in SEQ ID NO:5, for plasminogen and at least 0.5-fold, 1-fold, 2-fold, 3-fold or more for cleaving C3 to inactivate it. For example, modified u-PA polypeptides provided herein exhibit less than or less than about 99%, 95%, 90%, 80%, 70%, 60%, 50%, 40%, 30%, 20%, 10% or less of the u-PA activity of a wild type or reference u-PA polypeptide, such as the corresponding polypeptide not containing the amino acid modification (e.g. amino acid replacement), for example, a u-PA protease domain set forth in SEQ ID NO:5.

[0398] For example, exemplary positions that can be modified, for example by amino acid replacement or substitution, include, but are not limited to, any of positions corresponding to position 173, 178, 179, 180, 181, 185, 186, 187, 188, 208, 209, 249, 250, 252, 306, 314 or 353 with reference to the sequence of amino acids set forth in SEQ ID NO:3 (corresponding to positions 30, 35, 36, 37, 37a, 38, 39, 40, 41, 60a, 60b, 97a, 97b, 99, 149, 157 or 192 according to chymotrypsin numbering). For example, the amino acid positions can be replacements at positions corresponding to replacement of phenylalanine (F) at one or more of positions 173, R178, R179, H180, R181, V185, T186, Y187, V188, D208, Y209, T249, L250, H252, Y306, M314 or Q353 with reference to amino acid positions set forth in SEQ ID NO:3 (corresponding to F30, R35, R36, H37, R37a, V38, T39, Y40, V41, D60a, Y60b, T97a, L97b, H99, Y149, M157 and Q192, respectively according to chymotrypsin numbering).

[0399] Exemplary amino acid replacements at any of the above positions are set forth in Table 11. Reference to corresponding position in Table 11 is with reference to positions set forth in SEQ ID NO:3. (See, also the Examples, below). It is understood that the replacements can be made in the corresponding position in another u-PA polypeptide by alignment with the sequence set forth in SEQ ID NO:3, whereby the corresponding position is the aligned position. For example, the replacement can be made in the u-PA protease domain with the sequence set forth in SEQ ID NO: 2 or a reference u-PA protease domain with the sequence set forth in SEQ ID NO: 5. In some examples, the amino acid replacement(s) can be at the corresponding position in a u-PA polypeptide as set forth in SEQ ID NO: 5 or a variant thereof having at least or at least about 75%, 80%, 81%, 82%, 83%, 84%, 85%, 86%, 86%, 88%, 89%, 90%, 91%, 92%, 93%, 94%, 95%, 96%, 97%, 98%, 99%, particularly 95%, or more sequence identity thereto, so long as the resulting modified u-PA polypeptide exhibits altered (i. e., enhanced) specificity towards complement protein C3 compared to a u-PA activity towards plasminogen and/or an altered selectivity for complement protein C3. In one example, any one or more of the replacements are in any of SEQ ID NOs: 1-6, so long as the resulting modified u-PA polypeptide exhibits altered (i.e., enhanced) specificity towards complement protein C3 compared to a u-PA activity towards plasminogen and/or an altered selectivity for complement protein C3.

TABLE 11
Exemplary mutations that result in increased activity for cleavage of C3

| Corresponding Position | Corresponding Position | |
|---|---|---|
| (in SEQ ID NO: 3) | (chymotrypsin numbering) | Replacement |
| 173 | 30 | Y |
| 178 | 35 | W Y Q |
| 179 | 36 | H |
| 180 | 37 | E P D N G K Y |
| 181 | 37a | Q P E N S |
| 185 | 38 | D E |
| 186 | 39 | W Y F |
| 187 | 40 | H F Q |
| 188 | 41 | R L |
| 208 | 60a | P T |
| 209 | 60b | Q H S A T L |
| 249 | 97a | E I |
| 250 | 97b | A G |
| 252 | 99 | Q |
| 279 | 122 | S |
| 306 | 149 | K R |
| 314 | 157 | K |
| 353 | 192 | H |

[0400] Exemplary of amino acid modifications in the modified u-PA polypeptides provided herein include, but are not limited to, replacement with tyrosine (Y) at a position corresponding to position 173 (30 by chymotrypsin numbering); W at a position corresponding to position 178 (35 by chymotrypsin numbering); Y at a position corresponding to position 178; Q at a position corresponding to position 178; H at a position corresponding to position 179 (36 by chymotrypsin numbering); E at a position corresponding to position 180 (37 by chymotrypsin numbering); P at a position corresponding to position 180; D at a position corresponding to position 180; N at a position corresponding to position 180; G at a position corresponding to position 180; K at a position corresponding to position 180; Y at a position corresponding to position 180; Q at a position corresponding to position 181 (37a by chymotrypsin numbering); P at a position corresponding to position 181; E at a position corresponding to position 181; N at a position corresponding to position 181; S at a position corresponding to position 181; D at a position corresponding to position 185 (38 by chymotrypsin numbering); E at a position corresponding to position 185; W at a position corresponding to position 186 (39 by chymotrypsin numbering); Y at a position corresponding to position 186; F at a position corresponding to position 186; H at a position corresponding to position 187 (40 by chymotrypsin numbering); F at a position corresponding to position 187; Q at a position corresponding to position 187; R at a position corresponding to position 188 (41 by chymotrypsin numbering); L at a position corresponding to position 188; P at a position corresponding to position 208; T at a position corresponding to position 208 (60a by chymotrypsin numbering); Q at a position corresponding to position 209 (60b by chymotrypsin numbering); H at a position corresponding to position 209; S at a position corresponding to position 209; A at a position corresponding to position 209; T at a position corresponding to position 209; L at a position corresponding to position 209; E at a position corresponding to position 249 (97a by chymotrypsin numbering); I at a position corresponding to position 249; A at a position corresponding to position 250 (97b by chymotrypsin numbering); G at a position corresponding to position 250; Q at a position corresponding to position 252 (99 by chymotrypsin numbering); K at a position corresponding to position 306 (149 by chymotrypsin numbering); R at a position corresponding to position 306; K at a position corresponding to position 314 (157 by chymotrypsin numbering); or H at a position corresponding to position 353 (192 by chymotrypsin numbering); each with reference to the amino acid positions set forth in SEQ ID NO:3. S at a position corresponding to position 279 (122S) by chymotrypsin numbering) replaces a free Cys to thereby reduce a tendency for aggregation.

[0401] Exemplary modified u-PA polypeptides containing 2 or more amino acid modifications are set forth in Table 12 below, and their activity for cleaving C3 described in Table 14. The Sequence ID NO. references an exemplary u-PA protease domain that contains the recited replacements, which include the replacement at C122S to reduce or eliminate aggregation. C122 is a free cysteine, which can result in cross-linking among the protease polypeptides. It is understood that the protease domain is exemplary, and full-length and precursor molecules, as well as other catalytically active portions of the protease domain, full-length and precursor polypeptide can include the recited replacements, to form full-length activated modified u-PA polypeptides and other forms.

TABLE 12
modified u-PA polypeptides

| | | Exemplary |
|---|---|---|
| | | SEQ ID |
| Mature u-PA numbering | Chymotrypsin numbering | NO |
| F173Y/V185D/Y187H/V188R/L250A/ | F30Y/V38D/Y40H/V41R/L97bA/ | 8 |
| H252Q/C279S/M314K | H99Q/C122S/M157K | |
| F173Y/R178W/R179H/H180E/V185E/ | F30Y/R35W/R36H/H37E/V38E/T39W/ | 9 |
| T186W/Y187H/V188R/Y209Q/T249E/ | Y40H/V41R/Y60bQ/T97aE/L97bA/ | |
| L250A/H252Q/C279S/Y306K/M314K | H99Q/C122S/Y149K/M157K | |
| F173Y/R178W/R179H/H180D/V185E/ | F30Y/R35W/R36H/H37D/V38E/T39Y/ | 10 |
| T186Y/Y187F/V188R/T249I/L250A/ | Y40F/V41R/T97aI/L97bA/H99Q/ | |
| H252Q/C279S/Y306R/M314K | C122S/Y149R/M157K | |
| R178W/R179H/H180N/V185E/T186F/ | R35W/R36H/H37N/V38E/T39F/Y40F/ | 11 |
| Y187F/V188R/T249I/L250A/H252Q/ | V41R/T97aI/L97bA/H99Q/C122S/ | |
| C279S/Y306R/M314K/Q353H | Y149R/M157K/Q192H | |
| F173Y/R178Y/R179H/H180K/V185E/ | F30Y/R35Y/R36H/H37K/V38E/T39F/ | 12 |
| T186F/Y187F/V188R/T249I/L250A/ | Y40F/V41R/T97aI/L97bA/H99Q/ | |
| H252Q/C279S/Y306R/M314K | C122S/Y149R/M157K | |
| F173Y/R178W/R179H/H180N/V185E/ | F30Y/R35W/R36H/H37N/V38E/T39Y/ | 13 |
| T186Y/Y187F/V188R/Y209S/T249E/ | Y40F/V41R/Y60bS/T97aE/L97bA/ | |
| L250A/H252Q/C279S/Y306K/M314K | H99Q/C122S/Y149K/M157K | |
| F173Y/R178W/R179H/H180P/V185E/ | F30Y/R35W/R36H/H37P/V38E/T39Y/ | 14 |
| T186Y/Y187F/V188R/Y209S/T249E/ | Y40F/V41R/Y60bS/T97aE/L97bA/ | |
| L250A/H252Q/C279S/Y306K/M314K | H99Q/C122S/Y149K/M157K | |
| V185E/Y187Q/V188L/Y209L/L250A/ | V38E/Y40Q/V41L/Y60bL/L97bA/H99Q/ | 15 |
| H252Q/C279S | C122S | |
| F173Y/R178Q/R179H/H180G/R181E/V185E/ | F30Y/R35Q/R36H/H37G/R37aE/V38E/ | 16 |
| T186F/Y187F/V188R/D208P/Y209S/ | T39F/Y40F/V41R/D60aP/Y60bS/ | |
| T249I/L250A/H252Q/C279S/Y306R/M314K | T97aI/L97bA/H99Q/C122S/Y149R/ | |
| | M157K | |
| F173Y/R178Y/R179H/H180P/R181Q/V185E/ | F30Y/R35Y/R36H/H37P/R37aQ/V38E/ | 17 |
| T186Y/Y187F/V188R/Y209H/T249I/ | T39Y/Y40F/V41R/Y60bH/T97aI/ | |
| L250A/H252Q/C279S/Y306R/M314K | L97bA/H99Q/C122S/Y149R/M157K | |
| R178Q/H180Y/R181E/V185E/T186Y/V188R/ | R35Q/H37Y/R37aE/V38E/T39Y/V41R/ | 18 |
| D208T/Y209T/T249I/L250A/H252Q/ | D60aT/Y60bT/T97aI/L97bA/H99Q/ | |
| C279S/Y306R | C122S/Y149R | |
| R178W/H180P/R181N/V185E/T186Y/V188R/ | R35W/H37P/R37aN/V38E/T39Y/V41R/ | 19 |
| D208P/Y209L/T249I/L250A/H252Q/ | D60aP/Y60bL/T97aI/L97bA/H99Q/ | |
| C279S/Y306R | C122S/Y149R | |
| R178W/H180D/R181P/V185E/T186W/V188R/ | R35W/H37D/R37aP/V38E/T39W/V41R/ | 20 |
| Y209A/T249I/L250A/H252Q/C279S/ | Y60bA/T97aI/L97bA/H99Q/C122S/ | |
| Y306R | Y149R | |
| R178Q/H180Y/R181E/V185E/T186Y/V188R/ | R35Q/H37Y/R37aE/V38E/T39Y/V41R/ | 21 |
| D208P/Y209Q/T249I/L250A/H252Q/ | D60aP/Y60bQ/T97aI/L97bA/H99Q/ | |
| C279S/Y306R | C122S/Y149R | |
| H180Y/R181E/V185E/T186Y/V188R/D208P/ | H37Y/R37aE/V38E/T39Y/V41R/D60aP/ | 22 |
| Y209Q/T249I/L250A/H252Q/C279S/ | Y60bQ/T97aI/L97bA/H99Q/C122S/ | |
| Y306R | Y149R | |
| R178Q/R181E/V185E/T186Y/V188R/D208P/ | R35Q/R37aE/V38E/T39Y/V41R/D60aP/ | 23 |
| Y209Q/T249I/L250A/H252Q/C279S/ | Y60bQ/T97aI/L97bA/H99Q/C122S/ | |
| Y306R | Y149R | |
| R178Q/H180Y/V185E/T186Y/V188R/D208P/ | R35Q/H37Y/V38E/T39Y/V41R/D60aP/ | 24 |
| Y209Q/T249I/L250A/H252Q/C279S/ | Y60bQ/T97aI/L97bA/H99Q/C122S/ | |
| Y306R | Y149R | |
| R178Q/H180Y/R181E/T186Y/V188R/D208P/ | R35Q/H37Y/R37aE/T39Y/V41R/D60aP/ | 25 |
| Y209Q/T249I/L250A/H252Q/C279S/ | Y60bQ/T97aI/L97bA/H99Q/C122S/ | |
| Y306R | Y149R | |
| R178Q/H180Y/R181E/V185E/V188R/D208P/ | R35Q/H37Y/R37aE/V38E/V41R/D60aP/ | 26 |
| Y209Q/T249I/L250A/H252Q/C279S/ | Y60bQ/T97aI/L97bA/H99Q/C122S/ | |
| Y306R | Y149R | |
| R178Q/H180Y/R181E/V185E/T186Y/D208P/ | R35Q/H37Y/R37aE/V38E/T39Y/D60aP/ | 27 |
| Y209Q/T249I/L250A/H252Q/C279S/ | Y60bQ/T97aI/L97bA/H99Q/C122S/ | |
| Y306R | Y149R | |
| R178Q/H180Y/R181E/V185E/T186Y/V188R/ | R35Q/H37Y/R37aE/V38E/T39Y/V41R/ | 28 |
| Y209Q/T249I/L250A/H252Q/C279S/ | Y60bQ/T97aI/L97bA/H99Q/C122S/ | |
| Y306R | Y149R | |
| R178Q/H180Y/R181E/V185E/T186Y/V188R/ | R35Q/H37Y/R37aE/V38E/T39Y/V41R/ | 29 |
| D208P/T249I/L250A/H252Q/C279S/ | D60aP/T97aI/L97bA/H99Q/C122S/ | |
| Y306R | Y149R | |
| R178Q/H180Y/R181E/V185E/T186Y/V188R/ | R35Q/H37Y/R37aE/V38E/T39Y/V41R/ | 30 |
| D208P/Y209Q/L250A/H252Q/C279S/ | D60aP/Y60bQ/L97bA/H99Q/C122S/ | |
| Y306R | Y149R | |
| R178Q/H180Y/R181E/V185E/T186Y/V188R/ | R35Q/H37Y/R37aE/V38E/T39Y/V41R/ | 31 |
| D208P/Y209Q/T249I/H252Q/C279S/ | D60aP/Y60bQ/T97aI/H99Q/C122S/ | |
| Y306R | Y149R | |
| R178Q/H180Y/R181E/V185E/T186Y/V188R/ | R35Q/H37Y/R37aE/V38E/T39Y/V41R/ | 32 |
| D208P/Y209Q/T249I/L250A/C279S/ | D60aP/Y60bQ/T97aI/L97bA/C122S/ | |
| Y306R | Y149R | |
| R178Q/H180Y/R181E/V185E/T186Y/V188R/ | R35Q/H37Y/R37aE/V38E/T39Y/V41R/ | 33 |
| D208P/Y209Q/T249I/L250A/H252Q/ | D60aP/Y60bQ/T97aI/L97bA/H99Q/ | |
| C279S | C122S | |
| Y187Q/V188L/Y209L/L250A/H252Q/ | Y40Q/V41L/Y60bL/L97bA/H99Q/C122S | 34 |
| C279S | | |
| V185E/Y187Q/Y209L/L250A/H252Q/ | V38E/Y40Q/Y60bL/L97bA/H99Q/C122S | 35 |
| C279S | | |
| V185E/Y187Q/V188L/L250A/H252Q/ | V38E/Y40Q/V41L/L97bA/H99Q/C122S | 36 |
| C279S | | |
| V185E/Y187Q/V188L/Y209L/H252Q/ | V38E/Y40Q/V41L/Y60bL/H99Q/C122S | 37 |
| C279S | | |
| V185E/Y187Q/V188L/Y209L/L250A/ | V38E/Y40Q/V41L/Y60bL/L97bA/C122S | 38 |
| C279S | | |
| Y187Q/V188L/L250A/H252Q/C279S | Y40Q/V41L/L97bA/H99Q/C122S | 39 |
| Y187Q/V188L/L250A/C279S | Y40Q/V41L/L97bA/C122S | 40 |
| R181S/V188R/L250G/H252Q/C279S | R37aS/V41R/L97bG/H99Q/C122S | 41 |
| T186Y/V188R/L250A/H252Q/C279S | T39Y/V41R/L97bA/H99Q/C122S | 42 |
| T186Y/V188R/Y209Q/L250A/H252Q/C279S | T39Y/V41R/Y60bQ/L97bA/H99Q/C122S | 43 |
| T186Y/V188R/D208P/L250A/H252Q/C279S | T39Y/V41R/D60aP/L97bA/H99Q/C122S | 44 |

[0402] 2. Additional Modifications

[0403] Any of the modified u-PA polypeptides provided herein can contain any one or more additional modifications. The additional modifications can include, for example, any amino acid substitution, deletion or insertion known in the art, typically any that increase specificity towards complement protein C3 compared to u-PA activity towards plasminogen and/or alter selectivity for complement protein C3. Also, contemplated are modifications that alter any other activity of interest. It is long known in the art that amino acid modifications of the primary sequence are additive (see, e.g., Wells (1990) Biochem 29:8509-8517). Any modified u-PA polypeptide provided herein can contain 1, 2, 3, 4, 5, 6, 7, 8, 9, 10, 11, 12, 13, 14, 15, 16, 17, 18, 19, 20 or more additional amino acid modifications to provide additional activities or alter activities.

[0404] Examples of additional modifications that can be included in the modified u-PA polypeptides provided herein include, but are not limited to, those described in U.S. Pat. Nos. 4,997,766; 5,126,134; 5,129,569; 5,275,946; 5,571,708; 5,580,559; 5,648,253; 5,728,564; 5,759,542; 5,811,252; 5,891,664; 5,932,213; 5,980,886; 6,248,712; 6,423,685; 7,070,925; 7,074,401; 7,807,457; 7,811,771; and 8,211,428; U.S. Patent Publication Nos. 2002/0106775; 2004/0265298; 2004/0146938; 2009/0010916; 2011/0055940; 2008/0020416; and 2006/0142195; International Patent Publication Nos. WO1988/008451; WO1989/010401; WO1990/004635; WO1996/013160; and WO 2002/40503; Petersen et al. (2001) Eur J Biochem 268:4430-4439; Skeldal et al. (2006) FEBS J 273:5143-5149; Sun et al. (1997) J Biol Chem 272:23818-23823; Blouse et al. (2009) J Biol Chem 284:4647-4657; Nelles et al. (1987) JBC 262:5682-5689; Crowley et al. (1993) Proc. Natl. Acad. Sci. U.S.A. 90:5021-5025; Zeslawska et al. (2000) J Mol Biol 301:465-475; Zeslawska et al. (2003) J Mol Biol 328:109-118; Quax et al. (1998) Arterioscler Thromb Vasc Biol 18:693-701; Homandberg and Wai (1990) Thrombin Res 58:403-412; Zaitsev et al. (2010) Blood 115:5241-5248; Yang et al. (1994) Biochemistry 33:606-612; Davidow et al. (1991) Protein Eng 4:923-928; Boutad and Castellino (1993) Arch Biochem Biophys 303:222-230; Tsujikawa et al. (1996) Yeast 12:541-553; Carriero et al. (2002) Biol Chem 383:107-113; Stopelli et al. (1985) Proc. Natl. Acad. Sci. U.S.A. 82:4939-4943; Stoppelli et al. (1987) J Biol Chem 262:4437-4440; Franco et al. (1998)J Biol Chem 273:27734-27740; Franco et al. (1997)J Cell Biol 137:779-791; Li et al. (1995) J Biol Chem 270:30282-30285; Botkjaer et al. (2009) Biochemistry 48:9606-9617; Bdeir et al. (2003) Blood 102:3600-3608; Eguchi et al. (1990) J Biochem 108:72-79; Miyake et al. (1988) J Biochem 104:643-647; Bergstrom et al. (2003) Biochem 42:5395-5402; Sun and Liu (2005) Proteins 61:870-877; Sun et al. (1998) Biochemistry 37:2935-2940; Anderson et al. (2008) Biochem J 412:447-457; Li et al. (1992) Biochim Biophys Acta 1159:37-43; Lijnen et al. (1988) Eur J Biochem 177:575-582; Lijnen et al. (1988) Eur J Biochem 172:185-188; Lijnen et al. (1992) Eur J Biochem 205:701-709; Lijnen et al. (1994) Eur J Biochem 224:567-574; Lijnen et al. (1990) J Biol Chem 265:5232-5236; Yoshimoto et al. (1996) Biochim Biophys Acta 1293:83-89; Magdolen et al. (1996) Eur J Biochem 237:743-751; Nienaber et al. (2000) J Biol Chem 275:7239-7248; Gurewich et al. (1988) J Clin Invest 1956-1962; Liu et al. (1996) Biochemistry 35:14070-14076; Liu et al. (2002) Circ Res 90:757-763; Mukhina et al. (2000) J Biol Chem 275:16450-16458; Peng et al. (1997) Biochem Mol Biol Int 41:887-894; Turkmen et al. (1997) Electrophoresis 18:686-689; Peng et al. (1999) Biotechnol Lett 21:979-985; Ueshima et al. (1994) Thromb Haemost 71:134-140; and Melnick et al. (1990) J Biol Chem 265:801-807. Non-limiting examples of exemplary amino acid modifications described in the art include any one or more of S9A, C13A, T18A, C19A, V20A, S21A, N22Y, N22A, N22Q, N22R, K23A, K23H, K23Q, K23E, Y24A, F25A, S26A, S26F, N27A, N27R, I28A, H29A, H29R, W30A, W30R, W30F, N32S, K35A, G38R, E43A, I44A, D45A, K46A, S47A, S47G, K48A, K48P, T49A, Y51A, N54A, L80H, Q81R, Q82P, T83R, H99Y, P105A, D106A, N107A, R108A, R108D, R109A, R110A, G118N, L119R, K120R, K120A, P121L, L122T, L122R, V123Y, V123W, Q124A, E125A, H129A, D130G, C131W, K135G, K135S, K135Y, K135Q, K136P, S138E, C148S, C148A, K151E, T152A, R154G, R154P, R154A, P155R, P155L, P155A, P155N, P155S, P155G, P155Q, R156P, R156A, R156H, R156S, R156Y, R156E, R156G, R156L, F157L, F157T, F157G, F157Q, F157D, F157E, K158R, K158E, K158A, K158H, K158S, K158Y, K158G, K158W, K158V, K158M, I159R, I159A, I159P, I159G, I160A, I160K, G162R, E163A, F164V, F164A, F164V, I167L, P171L, F173I, F173V, F173L, F173T, F173G, F173M, A175S, Y177A, R178A, R179A, H180A, R181A, S184A, T186A, T186E, T186D, Y187A, Y187H, V188A, S192N, I194M, S195A, H204A, H204Q, F206A, D208A, Y209A, P210A, K211A, K211Q, K212A, E213A, D214A, Y215A, I216A, Y218A, R221A, S222L, R223G, R223A, L224A, L224P, N225A, S226P, N227A, Q229A, E231G, K233E, K233A, F234A, E235K, E235A, E237A, I240V, K243E, K243A, D244A, Y245A, D255A, R262A, K264A, E265A, R267A, C268Y, C279S, C279A, F289L, G290D, E294G, I295T, G297D, F298A, G299A, G299H, K300A, K300H, K300W, E301D, E301A, E301H, N302A, N302Q, N302V, N302L, N302I, N302S, N302T, S303E, S303A, S303E, T304A, T304V, T304M, D305A, Y306A, Y306G, Y306V, Y306H, L307A, Y308A, P309A, P309S, P309T, P309V, P309G, P309N, P309L, P309D, P309R, P309H, P309F, P309W, E310A, Q311A, L312P, L312V, L312M, K313Y, K313T, K313A, K313H, T315A, T315I, V316A, V317A, Y330H, A343T, D344A, Q346A, W347A, K348A, K348E, T349I, D350A, S351A, Q353A, G354R, D355A, S356A, G357E, G366C, R378C, R378A, K383A, K385A, R400A, H402A, K404A, E405A, E406A G408A, or A410V, according to the sequence of amino acids set forth in SEQ ID NO:3. Additional modifications include amino acid replacements that introduce a glycosylation site.

[0405] The modified u-PA polypeptides include those that contain chemical or post-translational modifications. In some examples, modified u-PA polypeptides provided herein do not contain chemical or post-translational modifications. Chemical and post-translational modifications include, but are not limited to, pegylation, sialation, albumination, glycosylation, farnysylation, carboxylation, hydroxylation, PASylation, HESylation, phosphorylation, linkage to a multimerization domain(s), such as Fc, and other polypeptide modifications known in the art. In addition to any one or more amino acid modifications, such as amino acid replacements, insertions, deletions, and combinations thereof, provided herein, modified u-PA polypeptides provided herein can be conjugated or fused to any moiety using any method known in the art, including chemical and recombinant methods, providing the resulting polypeptide, when in active form, retains the ability to effect inhibitory or inactivation cleavage of complement protein C3.

[0406] For example, in addition to any one or more amino acid modifications, such as amino acid replacements, provided herein, modified u-PA polypeptides provided herein also can contain other modifications that are or are not in the primary sequence of the polypeptide, including, but not limited to, modification with a carbohydrate moiety, a polyethylene glycol (PEG) moiety, a silation moiety, an Fc domain from immunoglobulin G, or any other domain or moiety. For example, such additional modifications can be made to increase the stability or serum half-life of the protein.

[0407] a. Decreased Immunogenicity

[0408] The modified u-PA polypeptides provided herein can be modified to have decreased immunogenicity. Decreased immunogenicity can be effected by sequence changes that eliminate antigenic epitopes from the polypeptide or by altering post-translational modifications. One of skill in the art is familiar with methods of identifying antigenic epitopes in a polypeptide (see e.g. Liang et al. (2009) BMC Bioinformatics, 10:302; Yang et al. (2009) Rev. Med. Virol., 19:77-96). In some examples, one or more amino acids can be modified in order to remove or alter an antigenic epitope. In another example, altering the glycosylation of a protein also can affect immunogenicity. For example, altering the glycosylation of the peptide is contemplated, so long as the polypeptides retain the ability to effect inhibitory or inactivation cleavage of complement protein C3. Glycosylation sites can be removed by single mutations. Glycosylation sites can be added by introducing a canonical sequence, such as by insertion or single or a plurality of mutations, such as NXS(T), where X is not a proline. Glycosylation sites also can increase serum half-life.

[0409] b. Fc Domain

[0410] The modified u-PA polypeptides can be linked to the Fc region of an immunoglobulin polypeptide. Typically, such a fusion retains at least a functionally active hinge, C_{H}2 and C_{H}3 domains of the constant region of an immunoglobulin heavy chain. For example, a full-length Fc sequence of IgG1 includes amino acids 99-330 of the sequence set forth in the SEQ ID NO: 45 below.

```
[sequence omitted].
                                325 330
An exemplary Fc sequence for hIgG1 is set forth in
SEQ ID NO: 50:
Pro Lys Ser Cys Asp Lys Thr His Thr Cys Pro Pro Cys Pro Ala Pro
1 5 10 15
Glu Leu Leu Gly Gly Pro Ser Val Phe Leu Phe Pro Pro Lys Pro Lys
                        20 25 30
Asp Thr Leu Met Ile Ser Arg Thr Pro Glu Val Thr Cys Val Val Val
                35 40 45
Asp Val Ser His Glu Asp Pro Glu Val Lys Phe Asn Trp Tyr Val Asp
        50 55 60
Gly Val Glu Val His Asn Ala Lys Thr Lys Pro Arg Glu Glu Gln Tyr
65 70 75 80
Asn Ser Thr Tyr Arg Val Val Ser Val Leu Thr Val Leu His Gln Asp
                                85 90 95
Trp Leu Asn Gly Lys Glu Tyr Lys Cys Lys Val Ser Asn Lys Ala Leu
                        100 105 110
Pro Ala Pro Ile Glu Lys Thr Ile Ser Lys Ala Lys Gly Gln Pro Arg
                115 120 125
Glu Pro Gln Val Tyr Thr Leu Pro Pro Ser Arg Glu Glu Met Thr Lys
        130 135 140
Asn Gln Val Ser Leu Thr Cys Leu Val Lys Gly Phe Tyr Pro Ser Asp
145 150 155 160
Ile Ala Val Glu Trp Glu Ser Asn Gly Gln Pro Glu Asn Asn Tyr Lys
                                165 170 175
Thr Thr Pro Pro Val Leu Asp Ser Asp Gly Ser Phe Phe Leu Tyr Ser
                        180 185 190
Lys Leu Thr Val Asp Lys Ser Arg Trp Gln Gln Gly Asn Val Phe Ser
                195 200 205
Cys Ser Val Met His Glu Ala Leu His Asn His Tyr Thr Gln Lys Ser
        210 215 220
Leu Ser Leu Ser Pro Gly Lys
225 230
```

It contains almost all of the hinge sequence corresponding to amino acids 100-110 of SEQ ID NO:45; the complete sequence for the C_{H}2 and C_{H}3 domain as set forth in SEQ ID NO:45.

[0411] Another exemplary Fc polypeptide is set forth in PCT application Publication No. WO 93/10151, and is a single chain polypeptide extending from the N-terminal hinge region to the native C-terminus of the Fc region of a human IgG1 antibody (SEQ ID NO:50). The precise site at which the linkage is made is not critical: particular sites are well known and can be selected in order to optimize the biological activity, secretion, or binding characteristics of the HABP polypeptide. For example, other exemplary Fc polypeptide sequences begin at amino acid C109 or P113 of the sequence set forth in SEQ ID NO: 45 (see e.g., U.S. Pub. No. 2006/0024298).

[0412] In addition to hIgG1 Fc, other Fc regions and other multimerization domains also can be used. For example, where effector functions mediated by Fc/FcγR interactions are to be minimized, fusion with IgG isotypes that poorly recruit complement or effector cells, such as for example, the Fc of IgG2 or IgG4, is contemplated. Additionally, the Fc fusions can contain immunoglobulin sequences that are substantially encoded by immunoglobulin genes belonging to any of the antibody classes, including, but not limited to IgG (including human subclasses IgG1, IgG2, IgG3, or IgG4), IgA (including human subclasses IgA1 and IgA2), IgD, IgE, and IgM classes of antibodies. Linkers can be used to covalently link Fc to another polypeptide to generate an Fc chimera.

[0413] Modified Fc domains also are well known. In some examples, the Fc region is modified such that it exhibits altered binding to an FcR to result in altered (i.e. more or less) effector function than the effector function of an Fc region of a wild-type immunoglobulin heavy chain. Thus, a modified Fc domain can have altered affinity, including but not limited to, increased or low or no affinity for the Fc receptor. For example, the different IgG subclasses have different affinities for the FcγRs, with IgG1 and IgG3 typically binding substantially better to the receptors than IgG2 and IgG4. Different FcγRs mediate different effector functions. FcγR1, FcγRIIa/c, and FcγRIIIa are positive regulators of immune complex triggered activation, characterized by having an intracellular domain that has an immunoreceptor tyrosine-based activation motif (ITAM). FcγRIIb, however, has an immunoreceptor tyrosine-based inhibition motif (ITIM) and is therefore inhibitory. Altering the affinity of an Fc region for a receptor can modulate the effector functions and/or pharmacokinetic properties associated by the Fc domain. Modified Fc domains are known to one of skill in the art and described in the literature, see e.g. U.S. Pat. No. 5,457,035; U.S. Patent Publication No. US 2006/0024298; and International Patent Publication No. WO 2005/063816 for exemplary modifications.

[0414] The resulting chimeric polypeptides containing Fc moieties, and multimers formed therefrom, can be easily purified by affinity chromatography over Protein A or Protein G columns.

[0415] In another example, the modified u-PA polypeptide can be linked to human serum albumin (HSA), such as residues 25-608 of HSA, or the full length, or portion thereof:

```
                10 20 30 40
MKWVTFISLL FLFSSAYSRG VFRRDAHKSE VAHRFKDLGE
                50 60 70 80
ENFKALVLIA FAQYLQQCPF EDHVKLVNEV TEFAKTCVAD
                90 100 110 120
ESAENCDKSL HTLFGDKLCT VATLRETYGE MADCCAKQEP
              130 140 150 160
ERNECFLQHK DDNPNLPRLV RPEVDVMCTA FHDNEETFLK
              170 180 190 200
KYLYEIARRH PYFYAPELLF FAKRYKAAFT ECCQAADKAA
              210 220 230 240
CLLPKLDELR DEGKASSAKQ GLKCASLQKF GERAFKAWAV
              250 260 270 280
ARLSQRFPKA EFAEVSKLVT DLTKVHTECC HGDLLECADD
              290 300 310 320
RADLAKYICE NQDSISSKLK ECCEKPLLEK SHCIAEVEND
              330 340 350 360
EMPADLPSLA ADFVGSKDVC KNYAEAKDVF LGMFLYEYAR
              370 380 390 400
RHPDYSVVLL LRLAKTYETT LEKCCAAADP HECYAKVFDE
              410 420 430 440
FKPLVEEPQN LIKQNCELFE QLGEYKFQNA LLVRYTKKVP
              450 460 470 480
QVSTPTLVEV SRNLGKVGSK CCKHPEAKRM PCAEDCLSVF
              490 500 510 520
LNQLCVLHEK TPVSDRVTKC CTESLVNGRP CFSALEVDET
              530 540 550 560
YVPKEFNAET FTFHADICTL SEKERQIKKQ TALVELVKHK
              570 580 590 600
PKATKEQLKA VMDDFAAFVE KCCKADDKET CFAEEGKKLV
AASQAALGL
```

[0416] c. Conjugation to Polymers

[0417] In some examples, the modified u-PA polypeptides provided herein are conjugated to other polymers. Polymers can increase the size of the polypeptide to reduce kidney clearance and thereby increase half-life or to modify the structure of the polypeptide to increase half-life or reduce immunogenicity. Exemplary polymers that can be conjugated to the u-PA polypeptides include natural and synthetic homopolymers, such as polyols (i.e. poly-OH), polyamines (i.e. poly-NH2) and polycarboxylic acids (i. e. poly-COOH), and other heteropolymers i.e. polymers comprising one or more different coupling groups e.g. a hydroxyl group and amine groups. Examples of suitable polymeric molecules include polymeric molecules selected from among polyalkylene oxides (PAO), such as polyalkylene glycols (PAG), including polyethylene glycols (PEG), methoxypolyethylene glycols (mPEG) and polypropylene glycols, PEG-glycidyl ethers (Epox-PEG), PEG-oxycarbonylimidazole (CDI-PEG), branched polyethylene glycols (PEGs), polyvinyl alcohol (PVA), polycarboxylates, polyvinylpyrrolidone, poly-D,L-amino acids, polyethylene-co-maleic acid anhydride, polystyrene-co-maleic acid anhydride, dextrans including carboxymethyl-dextrans, heparin, homologous albumin, celluloses, including methylcellulose, carboxymethylcellulose, ethylcellulose, hydroxyethylcellulose, carboxyethylcellulose and hydroxypropylcellulose, hydrolysates of chitosan, starches such as hydroxyethyl-starches and hydroxypropyl-starches, glycogen, agaroses and derivatives thereof, guar gum, pullulan, inulin, xanthan gum, carrageenan, pectin, alginic acid hydrolysates and biopolymers.

[0418] Typically, the polymers are polyalkylene oxides (PAO), such as polyethylene oxides, such as PEG, typically mPEG, which have few reactive groups capable of cross-linking. Typically, the polymers are non-toxic polymeric molecules such as (methoxy)polyethylene glycol (mPEG) which can be covalently conjugated to the u-PA polypeptides (e.g., to attachment groups on the protein surface) using a relatively simple chemistry.

[0419] Suitable polymeric molecules for attachment to the u-PA polypeptides include, but are not limited to, polyethylene glycol (PEG) and PEG derivatives such as methoxy-polyethylene glycols (mPEG), PEG-glycidyl ethers (Epox-PEG), PEG-oxycarbonylimidazole (CDI-PEG), branched PEGs, and polyethylene oxide (PEO) (see, e.g., Roberts et al., Advanced Drug Delivery Review 2002, 54: 459-476; Harris and Zalipsky (eds.) “Poly(ethylene glycol), Chemistry and Biological Applications” ACS Symposium Series 680, 1997; Mehvar et al., J. Pharm. Pharmaceut. Sci., 3(1): 125-136, 2000; Harris and Chess (2003) Nat Rev Drug Discov. 2(3):214-21; and Tsubery, J Biol. Chem 279(37):38118-24, 2004). The polymeric molecule can be of a molecular weight typically ranging from about 3 kDa to about 60 kDa. In some embodiments the polymeric molecule that is conjugated to a U-PA polypeptide provided herein has a molecular weight of 5, 10, 15, 20, 25, 30, 35, 40, 45, 50, 55, 60 or more than 60 kDa.

[0420] Methods of modifying polypeptides by covalently attaching (conjugating) a PEG or PEG derivative (i.e. “PEGylation”) are well known in the art (see, e.g., U.S. 2006/0104968; U.S. Pat. Nos. 5,672,662; 6,737,505; and U.S. 2004/0235734). Techniques for PEGylation include, but are not limited to, specialized linkers and coupling chemistries (see, e.g., Harris, Adv. Drug Deliv. Rev. 54:459-476, 2002), attachment of multiple PEG moieties to a single conjugation site (such as via use of branched PEGs; see, e.g., Veronese et al., Bioorg. Med. Chem. Lett. 12:177-180, 2002), site-specific PEGylation and/or mono-PEGylation (see, e.g., Chapman et al., Nature Biotech. 17:780-783, 1999), and site-directed enzymatic PEGylation (see, e.g, Sato, Adv. Drug Deliv. Rev., 54:487-504, 2002) (see, also, for example, Lu and Felix (1994) Int. J. Peptide Protein Res. 43:127-138; Lu and Felix (1993) Peptide Res. 6:142-6, 1993; Felix et al. (1995) Int. J. Peptide Res. 46:253-64; Benhar et al. (1994) J. Biol. Chem. 269:13398-404; Brumeanu et al. (1995)J Immunol. 154:3088-95; see also, Caliceti et al. (2003) Adv. Drug Deliv. Rev. 55(10):1261-77 and Molineux (2003) Pharmacotherapy 23 (8 Pt 2):3S-8S). Methods and techniques described in the art can produce proteins having 1, 2, 3, 4, 5, 6, 7, 8, 9, 10 or more than 10 PEG or PEG derivatives attached to a single protein molecule (see, e.g, U.S. 2006/0104968).

[0421] Numerous reagents for PEGylation have been described in the art. Such reagents include, but are not limited to, N-hydroxysuccinimidyl (NHS) activated PEG, succinimidyl mPEG, mPEG2-N-hydroxysuccinimide, mPEG succinimidyl alpha-methylbutanoate, mPEG succinimidyl propionate, mPEG succinimidyl butanoate, mPEG carboxymethyl 3-hydroxybutanoic acid succinimidyl ester, homobifunctional PEG-succinimidyl propionate, homobifunctional PEG propionaldehyde, homobifunctional PEG butyraldehyde, PEG maleimide, PEG hydrazide, p-nitrophenyl-carbonate PEG, mPEG-benzotriazole carbonate, propionaldehyde PEG, mPEG butryaldehyde, branched mPEG2 butyraldehyde, mPEG acetyl, mPEG piperidone, mPEG methylketone, mPEG “linkerless” maleimide, mPEG vinyl sulfone, mPEG thiol, mPEG orthopyridylthioester, mPEG orthopyridyl disulfide, Fmoc-PEG-NHS, Boc-PEG-NHS, vinylsulfone PEG-NHS, acrylate PEG-NHS, fluorescein PEG-NHS, and biotin PEG-NHS (see, e.g, Monfardini et al., Bioconjugate Chem. 6:62-69, 1995; Veronese et al., J. Bioactive Compatible Polymers 12:197-207, 1997; U.S. Pat. Nos. 5,672,662; 5,932,462; 6,495,659; 6,737,505; 4,002,531; 4,179,337; 5,122,614; 5,183,550; 5,324,844; 5,446,090; 5,612,460; 5,643,575; 5,766,581; 5,795,569; 5,808,096; 5,900,461; 5,919,455; 5,985,263; 5,990,237; 6,113,906; 6,214,966; 6,258,351; 6,340,742; 6,413,507; 6,420,339; 6,437,025; 6,448,369; 6,461,802; 6,828,401; 6,858,736; U.S. 2001/0021763; U.S. 2001/0044526; U.S. 2001/0046481; U.S. 2002/0052430; U.S. 2002/0072573; U.S. 2002/0156047; U.S. 2003/0114647; U.S. 2003/0143596; U.S. 2003/0158333; U.S. 2003/0220447; U.S. 2004/0013637; US 2004/0235734; U.S. 2005/000360; U.S. 2005/0114037; U.S. 2005/0171328; U.S. 2005/0209416; EP 01064951; EP 0822199; WO 00176640; WO 0002017; WO 0249673; WO 9428024; and WO 0187925).

[0422] d. Protein Transduction Domain

[0423] The modified u-PA polypeptides provided herein can be linked, such as a fusion protein containing an antibody, or antigen binding fragment thereof, conjugated to a protein transduction domain (PTD) that increases the retention of the antibody at a target site for therapy, such as a mucosal site, such as the eye. Any PTD can be employed so long as the PTD promotes the binding to target cell surfaces at the therapeutic site (e.g. mucosal site) and/or uptake of the modified u-PA polypeptide by target cells at the therapeutic site (e.g. mucosal site, such as the eye).

[0424] Generally, PTDs include short cationic peptides that can bind to the cell surface through electrostatic attachment to the cell membrane and can be uptaken by the cell by membrane translocation (Kabouridis (2003) TRENDS Biotech 21(11) 498-503). The PTDs provided generally interact with a target cell via binding to glycosaminoglycans (GAGs), such as for example, hyaluronic acid, heparin, heparan sulfate, dermatan sulfate, keratin sulfate or chondroitin sulfate and their derivatives.

[0425] The protein transduction domain can be of any length. Generally the length of the PTD ranges from 5 or about 5 to 100 or about 100 amino acids in length. For example, the length of the PTD can range from 5 or about 5 to 25 or about 25 amino acids in length. In some examples, the PTD is 5, 6, 7, 8, 9, 10, 11, 12, 13, 14, 15, 16, 17, 18, 19, 20, 21, 22, 23, 24 or 25 amino acids in length.

[0426] A single PTD or a plurality thereof can be conjugated to a modified u-PA polypeptide. These are advantageously employed for treatment of ocular or ophthalmic disorders, such as diabetic retinopathies or macular degeneration, including AMD. For example, multiple copies of the same PTD (e.g., dimer, trimer, tetramer, pentamer, hexamer, heptamer, octamer, nonamer, decamer or larger multimer) or different PTDs can be conjugated to the modified u-PA polypeptide.

[0427] Several proteins and their peptide derivatives possess cell internalization properties. Exemplary PTDs are known in the art and include, but are not limited to, PTDs listed in the Table below, including, for example, PTDs derived from human immunodeficiency virus 1 (HIV-1) TAT (SEQ ID NOS: 125-135; Ruben et al. (1989) J. Virol. 63:1-8), the herpes virus tegument protein VP22 (SEQ ID NO: 140; Elliott and O'Hare (1997) Cell 88:223-233), the homeotic protein of Drosophila melanogaster Antennapedia (Antp) protein (Penetratin PTD; SEQ ID NO: 112; Derossi et al. (1996)J. Biol. Chem. 271:18188-18193), the protegrin 1 (PG-1) anti-microbial peptide SynB (e.g., SynB1 (SEQ ID NO: 121), SynB3 (SEQ ID NO: 122), and SynB4 (SEQ ID NO: 123); Kokryakov et al. (1993) FEBS Lett. 327:231-236) and the Kaposi fibroblast growth factor (SEQ ID NO: 105; Lin et al., (1995) J. Biol. Chem. 270-14255-14258).

[0428] Other proteins and their peptide derivatives have been found to possess similar cell internalization properties. The carrier peptides that have been derived from these proteins show little sequence homology with each other, but are all highly cationic and arginine or lysine rich. Indeed, synthetic poly-arginine peptides have been shown to be internalized with a high level of efficiency and can be selected for conjugation to can antibody provided (Futaki et al. (2003) J. Mol. Recognit. 16:260-264; Suzuki et al. (2001) J. Biol. Chem. 276:5836-5840). The PTD also can be selected from among one or more synthetic PTDs, including but not limited to, transportan (SEQ ID NO: 136; Pooga et al. (1988) FASEB J. 12:67-77; Pooga et al. (2001) FASEB J. 15:1451-1453), MAP (SEQ ID NO: 103; Oehlke et al. (1998) Biochim. Biophys. Acta. 1414:127-139), KALA (SEQ ID NO: 101; Wyman et al. (1997) Biochemistry 36:3008-3017) and other cationic peptides, such as, for example, various β-cationic peptides (Akkarawongsa et al. (2008) Antimicrob. Agents and Chemother. 52(6):2120-2129). Additional PTD peptides and variant PTDs also are provided in, for example, U.S. Patent Publication Nos. US 2005/0260756, US 2006/0178297, US 2006/0100134, US 2006/0222657, US 2007/0161595, US 2007/0129305, European Patent Publication No. EP 1867661, PCT Publication Nos. WO 2000/062067, WO 2003/035892, WO 2007/097561, WO 2007/053512 and Table 13 herein (below). Any such PTDs provided herein or known in the art can be conjugated to a provided therapeutic antibody.

TABLE 13
Known Protein Transduction Domains

| Protein Transduction | | SEQ |
|---|---|---|
| Domain (PTD) | Source Protein | ID NO |
| TRSSRAGLQFPVGRVHRLLRK | Buforin II | 82 |
| RKKRRRESRKKRRRES | DPV3 | 83 |
| GRPRESGKKRKRKRLKP | DPV6 | 84 |
| GKRKKKGKLGKKRDP | DPV7 | 85 |
| GKRKKKGKLGKKRPRSR | DPV7b | 86 |
| RKKRRRESRRARRSPRHL | DPV3/10 | 87 |
| SRRARRSPRESGKKRKRKR | DPV10/6 | 88 |
| VKRGLKLRHVRPRVTRMDV | DPV1047 | 89 |
| VKRGLKLRHVRPRVTRDV | DPV1048 | 90 |
| SRRARRSPRHLGSG | DPV10 | 91 |
| LRRERQSRLRRERQSR | DPV15 | 92 |
| GAYDLRRRERQSRLRRRERQS | DPV15b | 93 |
| R | | |
| WEAALAEALAEALAEHLAEAL | GALA | 94 |
| AEALEALAA | | |
| KGSWYSMRKMSMKIRPFFPQQ | Fibrinogen beta | 95 |
| | chain | |
| KTRYYSMKKTTMKIIPFNRL | Fibrinogen gamma | 96 |
| | chain precursor | |
| RGADYSLRAVRMKIRPLVTQ | Fibrinogen alpha | 97 |
| | chain | |
| LGTYTQDFNKFHTFPQTAIGV | hCT(9-32) | 98 |
| GAP | | |
| TSPLNIHNGQKL | HN-1 | 99 |
| NSAAFEDLRVLS | Influenza virus | 100 |
| | nucleoprotein (NLS) | |
| WEAKLAKALAKALAKHLAKAL | KALA | 101 |
| AKALKACEA | | |
| VPMLKPMLKE | Ku70 | 102 |
| KLALKLALKALKAALKLA | MAP | 103 |
| GALFLGFLGAAGSTMGAWSQP | MPG | 104 |
| KKKRKV | | |
| AAVALLPAVLLALLAP | Human Fibroblast | 105 |
| | growth factor 4 | |
| | (Kaposi Fibroblast | |
| | growth factor) | |
| VQRKRQKLM | N50 (NLS of NF-kB | 106 |
| | P50) | |
| KETWWETWWTEWSQPKKKRKV | Pep-1 | 107 |
| SDLWEMMMVSLACQY | Pep-7 | 108 |
| RQIKIWFQNRRMKWKK | Penetratin | 109 |
| GRQIKIWFQNRRMKWKK | Penetratin variant | 110 |
| RRMKWKK | Short Penetratin | 111 |
| ERQIKIWFQNRRMKWKK | Penetratin 42-58 | 112 |
| RRRRRRR | Poly Arginine-R7 | 113 |
| RRRRRRRRR | Poly Arginine-R9 | 114 |
| RVIRVWFQNKRCKDKK | pISL | 115 |
| MANLGYWLLALFVTMWTDVGL | Prion mouse PrPc1- | 116 |
| CKKRPKP | 28 | |
| LLIILRRRIRKQAHAHSK | pVEC | 117 |
| LLIILRRRIRKQAHAH | pVEC variant | 118 |
| VRLPPPVRLPPPVRLPPP | SAP | 119 |
| PKKKRKV | SV-40 (NLS) | 120 |
| RGGRLSYSRRRFSTSTGR | SynB1 | 121 |
| RRLSYSRRRF | SynB3 | 122 |
| AWSFRVSYRGISYRRSR | SynB4 | 123 |
| YGRKKRRQRRRPPQ | Tat 47-60 | 124 |
| YGRKKRRQRRR | Tat 47-57 | 125 |
| YGRKKRRQRR | Tat 47-56 | 126 |
| GRKKRRQRR | Tat 48-56 | 127 |
| GRKKRRQRRR | Tat 48-57 | 128 |
| RKKRRQRRR | Tat 49-57 | 129 |
| RKKRRQRR | Tat 49-56 | 130 |
| GRKKRRQRRRPPQ | Tat 48-60 | 131 |
| GRKKR | Tat 48-52 | 132 |
| CFITKALGISYGRKKRRQRRR | Tat 37-72 | 133 |
| PPQFSQTHQVSLSKQ | | |
| FITKALGISYGRKKRRQRRRP | Tat 38-72 | 134 |
| QFSQTHQVSLSKQ | | |
| YGRKKRRQRRRPP | Tat 47-59 | 135 |
| GWTLNSAGYLLGKINLKALAA | Transportan | 136 |
| LAKKIL | | |
| AGYLLGKINLKALAALAKKIL | Transportan 10 | 137 |
| GWTLNSAGYLLG | Transportan | 138 |
| | derivative | |
| INLKALAALAKKIL | Transportan | 139 |
| | derivative | |
| DAATATRGRSAASRPTERPRA | VP22 | 140 |
| PARSASRPRRPVD | | |
| DPKGDPKGVTVTVTVTVTGKG | VT5 | 141 |
| DPKPD | | |
| GALFLGWLGAAGSTMGAWSQP | Signal Sequence- | 142 |
| KKKRKV | based peptide | |
| KLALKLALKALKAALKLA | Amphiphilic | 143 |
| | model peptide | |
| KFFKFFKFFK | Bacterial cell | 144 |
| | wall permeating | |
| LLGDFFRKSKEKIGKEFKRIV | LL-37 | 145 |
| QRIKDFLRNLVPRTES | | |
| SWLSKTAKKLENSAKKRISEG | Cecropin P1 | 146 |
| IAIAIQGGPR | | |
| ACYCRIPACIAGERRYGTCIY | alpha defensin | 147 |
| QGRLWAFCC | | |
| DHYNCVSSGGQCLYSACPIFT | beta defensin | 148 |
| KIQGTCYRGKAKCCK | | |
| RKCRIWIRVCR | Bactenecin | 149 |
| RRRPRPPYLPRPRPPPFFPPR | PR-39 | 150 |
| LPPRIPPGFPPRFPPRFPGKR | | |
| ILPWKWPWWPWRR | Indolicidin | 151 |
| GALFLGWLGAAGSTMGAWSQP | MPS | 152 |
| KKKRKV | | |
| PVIRRVWFQNKRCKDKK | pIs1 | 153 |

[0429] In some examples, the PTDs can be modified by replacement of a lysine or arginine with another basic amino acid, such as replacement of a lysine with an arginine or by replacement of an arginine with a lysine.

### E. ASSAYS TO ASSESS OR MONITOR U-PA ACTIVITY ON COMPLEMENT-MEDIATED FUNCTIONS

[0430] The modified u-PA polypeptides provided herein exhibit altered specificity and/or selectivity for complement protein C3. Exemplary modified u-PA polypeptides specifically cleave complement protein C3 and thereby alter complement activation. Further, exemplary modified u-PA polypeptides provided herein have altered, or reduced, specificity and/or selectivity for cleavage of natural substrates of u-PA, such as plasminogen, and binding to uPAR.

[0431] Various in vitro and in vivo assays can be used to monitor or screen u-PA polypeptides for their ability to cleave complement protein C3 and for their effects on complement activation and complement-mediated diseases and disorders. Such assays are well known to those of skill in the art. One of skill in the art can test a particular u-PA polypeptide for cleavage of complement protein C3 and/or test to assess any change in the effects of a u-PA on a complement-mediated activity compared to the absence of a protease. Some such assays are exemplified herein.

[0432] Exemplary in vitro and in vivo assays are provided herein for comparison of an activity of a modified u-PA polypeptide on the function of complement protein C3. As discussed below, numerous assays, such as assays for measuring complement activation, are known to one of skill in the art. Also provided herein are exemplary assays for determining the activity of the modified u-PA polypeptides for wild type u-PA activities, such as cleavage of plasminogen or binding to uPAR. Also provided are assays for determining the specificity of the modified u-PA polypeptides for complement protein C3. Exemplary assays are described below.

[0433] 1. Methods for Assessing Effects of u-PA on Complement Protein C3 Activity

[0434] A modified u-PA protease can exhibit alterations in specificity and/or selectivity to any one or more complement proteins and thereby inactivate any one or more complement proteins, such as, for example, C3, compared to the corresponding full-length, scaffold or wild-type form of the modified u-PA protease. Modified u-PA proteases retain their protease activity, but can exhibit an increased specificity and/or selectivity to any one or more complement proteins. Exemplary modified u-PA proteases specifically cleave any one or more complement protein, such as, for example, C3, and thereby alter the activity of a complement protein. All such modified u-PA proteases with increased specificity and/or selectivity to any one or more complement protein are candidate therapeutics.

[0435] Where the modified u-PA protease exhibits an increased specificity and/or selectivity to any one or more complement protein, in vitro and in vivo assays can be used to monitor or screen proteases for effects on complement-mediated functions. Such assays are well known to those of skill in the art. One of skill in the art can test a modified u-PA protease for cleavage of any one or more complement protein, such as, for example, C3, and/or test to assess any change in the effects of a modified u-PA protease on a complement-mediated activity compared to the absence of a modified u-PA protease. Some such assays are exemplified herein.

[0436] Exemplary in vitro and in vivo assays are provided herein for comparison of an activity of a modified u-PA protease on the function of any one or more targeted complement proteins. Many of the assays are applicable to other proteases and modified proteases. As discussed above, assays for activities of complement include, but are not limited to, assays that measure activation products of complement activation, such as for example the C5b-9 MAC complex, and generation of any one or more of the complement cleavage products such as C4a, C5a, C3b, and C3d. Assays to measure complement activation also include functional assays that measure the functional activity of specific components of the complement pathways, such as for example hemolytic assays used to measure activation of any one of the classical, lectin or alternative pathways. Assays to assess effects of proteases and modified proteases on complement proteins and/or complement-mediated functions include, but are not limited to, SDS-analysis followed by Western Blot or Coomassie Brilliant Blue staining, enzyme immunoassays, and hemolytic assays. In one example, in vitro assays can be performed using purified complement proteins. In another example, in vivo assays can be performed by testing the serum of a species, including mammalian or human species, for functional activation of complement. Exemplary assays are described below.

[0437] In one example, in vitro assays can be performed using purified complement protein C3, as exemplified in Example 2-4. In another example, in vitro assays can be conducted in physiologically relevant solutions (i.e., vitreous humor), as exemplified in Example 5. In another example, in vitro assays can be performed using peptide libraries to assess cleavage specificity. In another example, assays can be conducted to assess the normal functions of the modified u-PA polypeptides, i.e., activity towards normal substrates. Various disease models known to one of skill in the art can be used to test the efficacy of u-PA polypeptides provided herein on various complement-mediated diseases and disorders.

[0438] a. Protein Detection

[0439] Protein detection is a means to measure individual complement components in a sample. Complement proteins can be detected to assess directly the effects of a u-PA polypeptide on cleavage of complement protein C3, or alternatively, complement proteins can be measured as a means to assess complement activation. Complement protein C3, treated in the presence or absence of a u-PA polypeptide, can be analyzed by any one or more assays including SDS-PAGE followed by Coomassie staining or Western Blot, enzyme immunoassay, immunohistochemistry, flow cytometry, nephelometry, agar gel diffusion, or radial immunodiffusion. Exemplary assays for protein detection are described below.

[0440] i. SDS-PAGE Analysis

[0441] Analysis of complement proteins in the presence or absence of increasing concentrations of a u-PA polypeptide can be performed by analysis of proteins on SDS-PAGE followed by detection of those proteins. In such examples, complement proteins can be detected by staining for total protein, such as by Coomassie Brilliant Blue stain, Silver stain, or by any other method known to one of skill in the art, or by Western Blot using polyclonal or monoclonal antibodies specific for a specified protein. Typically, a purified complement protein, such as, for example, complement protein C3, can be incubated in the presence or absence of a u-PA polypeptide. The treated complement protein can be resolved on an SDS-PAGE gel followed by a method to detect protein in the gel, for example, by staining with Coomasie Brilliant blue. The treated protein can be compared to its cognate full length protein and the degradation products formed by protease cleavage of the protein can be determined.

[0442] In another embodiment, a sample, such as for example human serum or plasma, can be treated in the presence or absence of a u-PA polypeptide or can be collected after treatment of an animal or a human with or without a u-PA polypeptide. The u-PA-treated sample can be analyzed on SDS-PAGE and a specific complement protein can be detected, such as for example C3, C5, or Factor B, by Western Blot using monoclonal or polyclonal antibodies against the protein. The cleavage of the complement protein can be compared to a sample that was not treated with a u-PA polypeptide. Additionally, the sample can be stimulated to initiate complement activation such as by incubation with IgG which stimulates activation of the classical pathway or by LPS which stimulates activation of the alternative pathway. The sample can be resolved by SDS-PAGE for detection of any one or more of the native complement proteins to determine the presence or absence of cleavage products of a specified protein compared to a sample of the protein not treated with a u-PA polypeptide. In such examples, cleavage effector molecules of native complement proteins also can be analyzed by Western Blot using monoclonal and polyclonal antibodies to assess the activation of one or more of the complement pathways. Examples of complement effector molecules can include, but are not limited to, C3a, C3d, iC3b, Bb, and C5-b9. For example, decreased expression in a sample of Bb can indicate that a u-PA polypeptide inhibited the activation of the alternative pathway of complement. The cleavage products of the effector molecules also can be determined to assess the effects of increasing concentrations of a u-PA polypeptide on the cleavage of complement effector molecules themselves.

[0443] ii. Enzyme Immunoassay

[0444] Enzyme immunoassay (EIA; also called enzyme-linked immunosorbent assay; ELISA) is an assay used to measure the presence of a protein in a sample. Typically, measurement of the protein is an indirect measurement of the binding of the protein to an antibody, which itself is chemically labeled with a detectable substrate such as an enzyme or fluorescent compound. EIA assays can be used to measure the effects of u-PA polypeptides on complement activation by measuring for the presence of a complement effector molecule generated following complement activation. In such examples, a sample, such as for example human serum or plasma, can be pretreated in the presence or absence of increasing concentrations of a u-PA polypeptide and subsequently activated to induce complement activation by incubation with initiating molecules, or can be collected following treatment of an animal or a human with a u-PA polypeptide. For example, the classical pathway can be activated by incubation with IgG and the alternative pathway can be activated by incubation of the sample with LPS. A complement activation assay specific for the lectin pathway requires that the classical pathway of complement is inhibited since the C4/C2 cleaving activity of the lectin pathway is shared with the classical pathway of complement. Inhibition of the classical pathway can be achieved using a high ionic strength buffer which inhibits the binding of C1q to immune complexes and disrupts the C1 complex, whereas a high ionic strength buffer does not affect the carbohydrate binding activity of MBL. Consequently, activation of the lectin pathway can be induced by incubation of a sample, such as human serum or plasma, with a mannan-coated surface in the presence of 1 M NaCl.

[0445] Following activation, the sample can be quenched with the addition of Pefabloc (Roche) and EDTA to minimize continued activation of the pathways. Samples can be analyzed for the presence of complement effector molecules by an EIA or ELISA assay. EIA and ELISA assays for measuring complement proteins are well known to one skilled in the art. Any complement activation product can be assessed. Exemplary complement activation products for measurement of complement activation include iC3b, Bb, C5b-9, C3a, C3a-desArg and C5a-desArg. The complement pathway activated can be determined depending on the complement activation product measured. For example, measurement of Bb cleavage product is a unique marker of the alternative pathway.

[0446] In some examples, the EIA can be paired with detection of the cleaved complement proteins by analysis of the protease-treated, complement-stimulated sample by SDS-PAGE followed by Western blot analysis for identification of specific complement components. Using densitometry software, the cleavage of the complement product can be compared to the full length complement component cleaved throughout the assay and the appearance of all major degradation products and the percent cleavage can be determined.

[0447] iii. Radial Immunodiffusion (RID)

[0448] Radial immunodiffusion (RID) is a technique that relies on the precipitation of immune complexes formed between antibodies incorporated into agarose gels when it is poured, and antigen present in a test sample resulting in a circular precipitin line around the sample well. The diameter of the precipitin ring is proportional to the concentration of the antibody (or antigen) present in the test sample. By comparing the diameter of the test specimen precipitin ring to known standards, a relatively insensitive estimation of the concentration of specific antibody or antigen can be achieved. RID can be used to measure the amount of a complement protein in a sample. For example, a sample such as, for example, human serum or plasma, can be treated in the presence or absence of increasing concentrations of a u-PA polypeptide. The protease-treated sample can be added to a well of an agarose gel that has been made to incorporate a polyclonal or monoclonal antibody against any one of the complement proteins such as including, but not limited to, C3, C5, C6, C7, C9, or Factor B. After removal of unprecipitated proteins by exposure to 0.15 M NaCl, the precipitated protein rings can be assessed by staining with a protein dye, such as for example Coomassie Brilliant blue or Crowles double stain.

[0449] b. Hemolytic Assays

[0450] Functional hemolytic assays provide information on complement function as a whole. This type of assay uses antibody-sensitized or unsensitized sheep erythrocytes. Hemolytic assays include the total hemolytic complement assay (CH50), which measures the ability of the classical pathway and the MAC to lyse a sheep RBC. It depends on the sequential activation of the classical pathway components (C1 through C9) to lyse sheep erythrocytes that have been sensitized with optimal amounts of rabbit anti-sheep erythrocyte antibodies to make cellular antigen-antibody complexes. Hemolytic assays also can include an alternative pathway CH50 assay (rabbit CH50 or APCH50), which measures the ability of the alternative pathway and the MAC to lyse a rabbit RBC. One CH50 and/or APCH50 unit is defined as the quantity or dilution of serum required to lyse 50% of the red cells in the test. Typically, to assess complement activation, a sample, such as, for example, human serum or human plasma, can be treated in the presence or absence of increasing concentrations of a u-PA polypeptide, or can be collected following treatment of an animal or human in the presence or absence of a u-PA polypeptide. The protease-treated sample can be subsequently mixed with sheep's red blood cells that have been activated or sensitized with IgG. A water only sample mixed with sheep red blood cells can act as a total lysis control in order to accurately assess percent lysis of the samples analyzed. The addition of 0.15M NaCl to the sample can be added to stop the lysing reaction. Lysis of the red blood cells, induced by the activation of the terminal components of the complement pathway, can be assessed by measuring the release of hemoglobin. Measurement can be by optical density (OD) readings of the samples using a spectrophotometer at an OD of 415 nm.

[0451] In one embodiment, limiting dilution hemolytic assays can be used to measure functional activity of specific components of either pathway. In such an assay, a serum source is used that has an excess of all complement components, but is deficient for the one being measured in the sample, i.e. a media or serum source is complement-depleted for a specific protein. The extent of hemolysis is therefore dependent on the presence of the measured component in the test sample. In such an assay, a purified complement protein, such as for example any one of the native complement proteins including, but not limited to C3, can be incubated in the presence or absence of increasing concentrations of a u-PA polypeptide. The protease-treated purified complement protein can then be mixed with complement-depleted media or plasma and IgG-activated sheep red blood cells and hemolysis of the sample can be assessed as described above. In another embodiment, protease cleavage can be correlated with complement activation by assaying for hemolytic activity of a protease-treated sample, and subsequently analyzing the sample on SDS-PAGE gel followed by staining with a protein stain, such as for example Coomassie Blue. The purified complement protein treated with the proteases can be assessed for cleavage and the percentage of the full length complement component cleaved throughout the assay and the appearance of all major degradation products can be calculated. Alternatively, analysis of the protease-treated complement protein can be by Western blot.

[0452] An alternative to the hemolytic assay, called the liposome immunoassay (LIA), can be used to assess activation of the classical pathway. The LIA (Waco Chemicals USA, Richmond, Va.) utilizes dinitrophenyl (DNP)-coated liposomes that contain the enzyme glucose-6-phosphate dehydrogenase. When serum is mixed with the liposomes and a substrate containing anti-DNP antibody, glucose-6-phosphate, and nicotinamide adenine dinucleotide, activated liposomes lyse, and an enzymatic colorimetric reaction occurs which is proportional to total classical complement activity.

[0453] c. Methods for Determining Cleavage Sites

[0454] Cleavage sequences in complement protein C3 can be identified by any method known in the art (see e.g., published U.S. Publication No. US 2004/0146938). In one example, a cleavage sequence is determined by incubating complement protein C3 with any modified u-PA polypeptide provided herein. Following incubation with the u-PA polypeptide, the C3 protein can be separated by SDS-PAGE and degradative products can be identified by staining with a protein dye such as Coomassie Brilliant Blue. Proteolytic fragments can be sequenced to determine the identity of the cleavage sequences. After identification, fluorogenic peptide substrates designed based on the cleavage sequence of a desired target substrate can be used to assess activity, as described below.

[0455] 2. Methods for Assessing Wild Type u-PA Activity

[0456] The modified u-PA polypeptides provided herein have altered, or reduced, specificity for plasminogen and uPAR. u-PA polypeptides can be tested to determine whether they retain catalytic efficiency and/or substrate specificity for their native substrate plasminogen. For example, cleavage of plasminogen can be assessed by incubation of a u-PA polypeptide with plasminogen and detecting protein cleavage products. In another example, cleavage of plasminogen can be determined in vitro by measuring cleavage of a fluorogenically tagged tetrapeptide of the peptide substrate, for example, a fluorogenic substrate, such as fluorophores ACC (7-amino-4-carbamoylmethylcoumarin) or AMC (7-amino-4-methylcoumarin) linked to a tetrapeptide substrate. In some examples, plasminogen activation assays are used to determine the specificity of the u-PA polypeptides provided herein. In other examples, the ability of the u-PA polypeptides provided herein to bind to the u-PA receptor (uPAR) is determined.

[0457] a. Cleavage of Plasminogen

[0458] In one example, modified u-PA polypeptides can be assayed using individual fluorogenic peptide substrates corresponding to the desired cleavage sequence. For example, a method of assaying for a modified u-PA protease that can cleave any one or more of the desired cleavage sequences includes: (a) contacting a peptide fluorogenic sample (containing a desired target cleavage sequence) with a protease, in such a manner whereby a fluorogenic moiety is released from a peptide substrate sequence upon action of the protease, thereby producing a fluorescent moiety; and (b) observing whether the sample undergoes a detectable change in fluorescence, the detectable change being an indication of the presence of the enzymatically active protease in the sample. In such an example, the desired cleavage sequence is made into a fluorogenic peptide by methods known in the art. In one embodiment, the individual peptide cleavage sequences can be attached to a fluorogenically tagged substrate, such as for example an ACC or AMC fluorogenic leaving group, and the release of the fluorogenic moiety can be determined as a measure of specificity of a protease for a peptide cleavage sequence. The rate of increase in fluorescence of the target cleavage sequence can be measured such as by using a fluorescence spectrophotometer. The rate of increase in fluorescence can be measured over time. Michaelis-Menton kinetic constants can be determined by the standard kinetic methods. The kinetic constants k_{cat}, Kₘ and k_{cat}/Kₘ can be calculated by graphing the inverse of the substrate concentration versus the inverse of the velocity of substrate cleavage, and fitting to the Lineweaver-Burk equation (1/velocity=(Kₘ/Vₘₐₓ)(1/[S])+1/Vₘₐₓ; where Vₘₐₓ=[E_{T}]k_{cat}). The second order rate constant or specificity constant (k_{cat}/Kₘ) is a measure of how well a substrate is cut by a particular protease. For example, an ACC- or AMC-tetrapeptide such as Ac-CPGR-AMC can be made and incubated with a modified u-PA polypeptide provided herein and activity of the u-PA polypeptide can be assessed by assaying for release of the fluorogenic moiety. The choice of the tetrapeptide depends on the desired cleavage sequence to target and can be empirically determined.

[0459] In other embodiments, u-PA polypeptides also can be assayed to ascertain that, when in an active form, they cleave the desired sequence when presented in the context of the full-length protein. In one example, a purified target protein, i.e. plasminogen, can be incubated in the presence or absence of a selected u-PA polypeptide and the cleavage event can be monitored by SDS-PAGE followed by Coomassie Brilliant Blue staining for protein and analysis of cleavage products using densitometry.

[0460] b. Plasminogen Activation Assays Any assay known to one of skill in the art can be used to determine if the u-PA polypeptides activate plasminogen. In one example, activation of plasminogen can be determined by incubating the polypeptides in the presence of plasminogen and a detectable plasmin substrate, such as, for example, the chromogenic substrate H-D-Val-Leu-Lys-p-nitroanalide (Chromogenix S-2251) or the fluorogenic substrate H-D-Val-Leu-Lys-7-amido-4-methylcoumarin. Hydrolysis is then monitored by measuring absorbance at 405 nm or by detecting fluorescence using a fluorescence plate reader with an excitation wavelength of 390 nm and an emission wavelength of 480 nm. In another example, activation of plasminogen is assessed while the u-PA polypeptides are bound to uPAR. In such example, the u-PA polypeptides are first bound to uPAR on a cell surface, such as a U397 cell, followed by addition of plasminogen and a detectible plasmin substrate and hydrolysis is measured as described above.

[0461] c. u-PA-uPAR Binding Assays

[0462] Binding of the u-PA polypeptides to uPAR can be assessed by any assay known to one of skill in the art to detect protein-protein binding interactions, including, but not limited to, solid phase binding assays, ELISA, surface plasmon resonance and FACS. In one example, ELISA can be used. The recombinant uPAR is immobilized on a microtiter plate and u-PA polypeptide binding is assessed by addition of a reagent that specifically binds to u-PA, such as, for example, a u-PA binding antibody. In another example, binding can be determined in a cell based assay using a cell line, such as, for example, U397 cells, that expresses the u-PA receptor. The u-PA polypeptides can be labeled, for example, with a chromogenic, fluorogenic or radioactive substrate to effect detection of binding.

[0463] d. C3 Cleavage

[0464] The activity of the modified uPA polypeptides can be assessed by cleavage of the substrate complement protein human C3 by measuring the amount of intact human C3 remaining after incubation with various concentrations of the modified uPA protease. In accord with this assay, signal is generated in the presence of intact human C3, and is lost as the C3 is cleaved. In other examples, C3 activation assays are used to determine the specificity of the modified uPA polypeptides provided herein.

[0465] Purified C3 protein can be incubated with the modified u-PA polypeptides and the residual levels of undigested human C3 can be quantified by any assay known in the art to assess protein concentration, such as, for example using an Amplified Luminescent Proximity Homogeneous Assay Screen (AlphaScreen®; Perkin Elmer). The C3/uPA polypeptide mixture is incubated with a-mouse IgG-coated acceptor beads, and following incubation the a-hC3 mAb/acceptor beads mixture is incubated with a biotinylated a-hC3 pAb. Streptavidin-coated donor beads are added to the mixture and the ‘alphascreen’ signal (Excitation=680 nm, Emission=570 nm) is then measured. This signal corresponds to the concentration of remaining C3 protein. The concentration of uPA polypeptide required to cleave through 50% of the available hC3 (EC₅₀) can be calculated.

[0466] ACC-AGR+ELISA

[0467] Provided herein are methods of assessing substrate specificity of the modified u-PA polypeptides. The use of a fluorogenic peptide substrate, such as for example a 7-amino-4-methylcoumarin (AMC) fluorogenic peptide substrate or a 7-amino-4-carbamoylmethylcoumarin (ACC) fluorogenic peptide substrate, can be used to assay the activity of a modified protease whereby a fluorogenic moiety is released from a peptide substrate upon action of the protease, and the release of the fluorogenic moiety can be determined as a measure of specificity of a protease for a peptide cleavage sequence. The rate of increase in fluorescence of a non-target substrate cleavage sequence or target cleavage sequence can be measured such as by using a fluorescence spectrophotometer. The rate of increase in fluorescence can be measured over time. Michaelis-Menton kinetic constants can be determined by the standard kinetic methods. The kinetic constants k_{cat}, Kₘ and k_{cat}/Kₘ can be calculated by graphing the inverse of the substrate concentration versus the inverse of the velocity of substrate cleavage, and fitting to the Lineweaver-Burk equation (1/velocity=(Kₘ/Vₘₐₓ)(1/[S])+1/Vₘₐₓ; where Vₘₐₓ=[E_{T}]k_{cat}). The specificity constant (k_{cat}/Kₘ) is a measure of how well a substrate is cut by a particular protease.

[0468] In one example, any one or more of the cleavage sequences of a complement protein can be determined and used as a desired target cleavage sequence. For example, any one or more of the C3 cleavage sequences. In another example, a sequence corresponding to a substrate of the wild-type protease can be used to assay residual protease activity.

[0469] In an additional embodiment, a full length complement protein can be used as a target substrate to assay for protease specificity compared to a full length native target substrate of a protease. Further, a full length complement protein can be used to assess the correlation between substrate specificity and cleavage by a protease of a full length target substrate versus a four amino acid P1-P4 substrate cleavage sequence contained within the target substrate. In one example, a full length C3 protein can be used as a desired cleavage target of any one or more or the proteases to assess specificity. In this example, cleavage of C3 by a modified protease can be compared to cleavage of another full-length substrate, or the cleavage can be compared to a fluorogenic tetrapeptide cleavage sequence of C3. The specificity constant of cleavage of a full length protein by a protease can be determined by using gel densitometry to assess changes in densitometry over time of a full-length target substrate band incubated in the presence of a protease.

[0470] In an additional embodiment, the activity of a modified u-PA polypeptide can be assessed after prolonged incubation in cynomolgus plasma or vitreous humor. In one example, the residual protease activity is assayed with fluorogenic substrate AGR-ACC (7-amino-4-carbamoylmethyl-coumarin) after incubation in 80% Cynomolgus vitreous humor. For example, the modified u-PA polypeptide of SEQ ID NO:21 exhibits comparable ability to cleave the fluorogenic substrate AGR-ACC after 7 days incubation in vitreous and PBS. In another example, the modified u-PA polypeptide of SEQ ID NO:21 cleaves the fluorogenic substrate AGR-ACC at a similar levels before and after 7 day incubation in vitreous humor.

[0471] Assessing Specificity Using Peptide Libraries

[0472] Provided herein are methods of assessing substrate specificity of the resulting modified u-PA polypeptides using peptide libraries coupled to fluorogenic peptides. A modified u-PA polypeptide can be verified for P1-P4 substrate specificity at any given sub-site using a peptide library coupled to a fluorogenic substrate (Harris et al., (2000) Proc. Natl. Acad. Sci. U.S.A. 97:7754; US 2004/0175777; US 2004/0146938). Use of a peptide library or peptide libraries allows for the rapid and facile determination of proteolytic substrate. This strategy involves the use of libraries of peptides whereby one position in the library is held constant (i.e., the P1 position), while the remaining positions (i.e., P4-P2 and/or P1′ and/or P2′) are composed of all combinations of amino acids used to prepare the library. The use of a combinatorial fluorogenic peptide substrate library, such as for example a 7-amino-4-methylcoumarin (AMC) fluorogenic peptide substrate or a 7-amino-4-carbamoylmethylcoumarin (ACC) fluorogenic peptide substrate, can be used to assay for the activity of a modified protease whereby a fluorogenic moiety is released from a peptide substrate upon action of the protease. Those of skill in the art will appreciate that these methods provide a wide variety of alternative library formats. In one example, a protease can be profiled with a P1-diverse library. A P1-diverse tetrapeptide library contains ACC- or AMC-fluorogenic tetrapeptides whereby the P1 position is systematically held constant while the P2, P3, and P4 positions contain an equimolar mixture of any one or more of 15 amino acids. Determination and consideration of particular limitations relevant to any particular enzyme or method of substrate sequence specificity determination are within the ability of those of skill in the art.

[0473] Those of skill in the art recognize that many methods exist to prepare the peptides. In an exemplary embodiment, the substrate library is screened by attaching a fluorogenically tagged substrate to a solid support. In one example, the fluorogenic leaving group from the substrate peptide is synthesized by condensing an N-Fmoc coumarin derivative, to acid-labile Rink linker to provide ACC resin (Backes et al., (2000) Nat Biotechnol. 18:187). Fmoc-removal produces a free amine. Natural, unnatural and modified amino acids can be coupled to the amine, which can be elaborated by the coupling of additional amino acids. In an alternative embodiment, the fluorogenic leaving group can be 7-amino-4-methylcoumarin (AMC) (Harris et al., (2000) Proc. Natl. Acad. Sci. U.S.A. 97:7754). After the synthesis of the peptide is complete, the peptide-fluorogenic moiety conjugate can be cleaved from the solid support, or alternatively, the conjugate can remain tethered to the solid support.

[0474] Typically, a method of preparing a fluorogenic peptide or a material including a fluorogenic peptide includes: (a) providing a first conjugate containing a fluorogenic moiety covalently bonded to a solid support; (b) contacting the first conjugate with a first protected amino acid moiety and an activating agent, thereby forming a peptide bond between a carboxyl group and the amine nitrogen of the first conjugate; (c) de-protecting, thereby forming a second conjugate having a reactive amine moiety; (d) contacting the second conjugate with a second protected amino acid and an activating agent, thereby forming a peptide bond between a carboxyl group and the reactive amine moiety; and (e) de-protecting, thereby forming a third conjugate having a reactive amine moiety. In an exemplary embodiment, the method further includes: (f) contacting the third conjugate with a third protected amino acid and an activating agent, thereby forming a peptide bond between a carboxyl group and the reactive amine moiety; and (e) de-protecting, thereby forming a fourth conjugate having a reactive amine moiety.

[0475] For amino acids that are difficult to couple (e.g., Ile, Val, etc.), free, unreacted amine can remain on the support and complicate subsequent synthesis and assay operations. A specialized capping step employing the 3-nitrotriazole active ester of acetic acid in DMF efficiently acylates the remaining aniline. The resulting acetic-acid capped coumarin that can be present in unpurified substrate sequence solution is generally not a protease substrate sequence.

[0476] Solid phase peptide synthesis in which the C-terminal amino acid of the sequence is attached to an insoluble support followed by sequential addition of the remaining amino acids in the sequence is an exemplary method for preparing the peptide backbone of the polypeptides provided herein. Techniques for solid phase synthesis are described by Narany and Merrifield, Solid-Phase Peptide Synthesis; pp. 3-284 in The Peptides: Analysis, Synthesis, Biology. Vol. 2; Special Methods in Peptide Synthesis, Part A., Gross and Meienhofer, eds. Academic press, N.Y., (1980); and Stewart et al., (1984) Solid Phase Peptide Synthesis, 2nd ed. Pierce Chem. Co., Rockford, Ill. Solid phase synthesis is most easily accomplished with commercially available peptide synthesizers utilizing Fmoc or t-BOC chemistry.

[0477] For example, peptide synthesis can be performed using well known Fmoc synthesis chemistry. For example, the side chains of Asp, Ser, Thr, and Tyr are protected using t-butyl and the side chain of Cys residue using S-trityl and S-t-butylthio, and Lys residues are protected using t-Boc, Fmoc and 4-methyltrityl. Appropriately protected amino acid reagents are commercially available or can be prepared using art-recognized methods. The use of multiple protecting groups allows selective deblocking and coupling of a fluorophore to any particular desired side chain. Thus, for example, t-Boc deprotection is accomplished using TFA in dichloromethane. Fmoc deprotection is accomplished using, for example, 20% (v/v) piperidine in DMF or N-methylpyrolidone, and 4-methyltrityl deprotection is accomplished using, for example, 1 to 5% (v/v) TFA in water or 1% TFA and 5% triisopropylsilane in DCM. A-t-butylthio deprotection is accomplished using, for example, aqueous mercaptoethanol (10%). Removal of t-butyl, t-boc, and S-trityl groups is accomplished using, for example, TFA:phenol:water:thio-aniso:ethanedithio (85:5:5:2.5:2.5), or TFA:phenol:water (95:5:5).

[0478] Diversity at any particular position or combination of positions can be introduced using a mixture of at least two, six, 12, 20 or more amino acids to grow the peptide chain. The mixtures of amino acids can include any useful amount of a particular amino acid in combination with any useful amount of one or more different amino acids. In one embodiment, the mixture is an isokinetic mixture of amino acids (a mixture in appropriate ratios to allow for equal molar reactivity of all components). Modified proteases, such as for example a modified u-PA protease described herein, can be assayed using individual fluorogenic peptide substrates corresponding to a desired cleavage sequence. A method of assaying for a modified protease that can cleave any one or more of the C3 cleavage sequences includes: (a) contacting a peptide fluorogenic sample (containing a C3 cleavage sequence) with a protease, in such a manner whereby a fluorogenic moiety is released from a peptide substrate sequence upon action of the protease, thereby producing a fluorescent moiety; and (b) observing whether the sample undergoes a detectable change in fluorescence, the detectable change being an indication of the presence of the enzymatically active protease in the sample. In such an example an ACC- or AMC-tetrapeptide such as Ac-AGR-AMC can be made and incubated with a modified protease and activity of the protease can be assessed by assaying for release of the fluorogenic moiety.

[0479] Assaying for a protease in a solution simply requires adding a quantity of the stock solution of a protease to a fluorogenic protease indicator peptide and measuring the subsequent increase in fluorescence or decrease in excitation band in the absorption spectrum. The solution and the fluorogenic indicator also can be combined and assayed in a “digestion buffer” that optimizes activity of the protease. Buffers suitable for assaying protease activity are well known to those of skill in the art. In general, a buffer is selected with a pH which corresponds to the pH optimum of the particular protease. For example, a buffer particularly suitable for assaying elastase activity contains 50 mM sodium phosphate, 1 mM EDTA at pH 8.9. The measurement is most easily made in a fluorometer, an instrument that provides an “excitation” light source for the fluorophore and then measures the light subsequently emitted at a particular wavelength. Comparison with a control indicator solution lacking the protease provides a measure of the protease activity. The activity level can be precisely quantified by generating a standard curve for the protease/indicator combination in which the rate of change in fluorescence produced by protease solutions of known activity is determined.

[0480] While detection of fluorogenic compounds can be accomplished using a fluorometer, detection also can be accomplished by a variety of other methods well known to those of skill in the art. Thus, for example, when the fluorophores emit in the visible wavelengths, detection can be simply by visual inspection of fluorescence in response to excitation by a light source. Detection also can be by means of an image analysis system utilizing a video camera interfaced to a digitizer or other image acquisition system. Detection also can be by visualization through a filter, as under a fluorescence microscope. The microscope can provide a signal that is simply visualized by the operator. Alternatively, the signal can be recorded on photographic film or using a video analysis system. The signal also can simply be quantified in real time using either an image analysis system or a photometer.

[0481] Thus, for example, a basic assay for protease activity of a sample involves suspending or dissolving the sample in a buffer (at the pH optima of the particular protease being assayed) or in a test condition (e.g., vitreous humor or serum), adding to the buffer a fluorogenic protease peptide indicator, and monitoring the resulting change in fluorescence using a spectrofluorometer as shown in e.g., Harris et al., (1998)J Biol Chem 273:27364. The spectrofluorometer is set to excite the fluorophore at the excitation wavelength of the fluorophore. The fluorogenic protease indicator is a substrate sequence of a protease that changes in fluorescence due to a protease cleaving the indicator.

[0482] Modified proteases also are assayed to ascertain that they will cleave the desired sequence when presented in the context of the full-length protein. The target substrate proteins containing C3 cleavage sites are in the C3 activation cleavage or active sites. Methods to assess cleavage of a target protein are described herein and/or are well known in the art. In one example, a purified complement protein, for example C3, can be incubated in the presence or absence of a modified protease and the cleavage event can be monitored by SDS-PAGE followed by Coomassie Brilliant Blue staining for protein and analysis of cleavage products using densitometry. The activity of the target protein also is assayed, such as, for example in a hemolysis assay, using methods described herein or that are well known in the art, to verify that its function has been destroyed by the cleavage event.

[0483] 3. Specificity

[0484] The specificity constant of cleavage of target substrate, e.g., complement protein C3 or plasminogen, by a modified u-PA polypeptide can be determined by using gel densitometry to assess changes in densitometry over time of a full-length target substrate incubated in the presence of a u-PA polypeptide. In specific embodiments, comparison of the specificities of a modified u-PA polypeptide can be used to determine if the modified u-PA polypeptide exhibits altered, for example, increased, specificity for C3 compared to the wild-type u-PA polypeptide. The specificity of a u-PA polypeptide for a target substrate, e.g. complement protein C3, can be determined from the specificity constant of cleavage of a target substrate compared to a non-target substrate (e.g. the native wild-type substrate of u-PA). A ratio of the specificity constants of a modified u-PA polypeptide for the target substrate C3 versus a non-target substrate, such as plasminogen, can be made to determine a ratio of the efficiency of cleavage of the modified u-PA polypeptide. Comparison of the ratio of the efficiency of cleavage between a modified u-PA polypeptide and a wild-type u-PA polypeptide can be used to assess the fold change in specificity for a target substrate. Specificity can be at least 2-fold, at least 4-fold, at least 5-fold, at least 6-fold, at least 7-fold, 8, 9, 10, 20, 30, 40, 50, 60, 70, 80, 90, 100, 200, 300, 400, 500, 600, 700, 800, 900, or 1000 times or more when compared to the specificity of a wild-type u-PA polypeptide for a target substrate versus a non-target substrate.

[0485] Kinetic analysis of cleavage of native substrates of a u-PA polypeptide can be compared to analysis of cleavage of desired target substrates in complement protein C3 to assess specificity of the modified u-PA polypeptide for complement protein C3. Second order rate constants of inhibition (ki) can be assessed to monitor the efficiency and reactivity of a modified u-PA polypeptide for complement protein C3. For purposes herein, the modified u-PA polypeptides cleave C3 so that complement activation is inhibited, and, as shown in the Examples, they do so with significantly greater activity, such as at least 5-fold more activity, than the unmodified u-PA polypeptide (or u-PA polypeptide modified with the C122S replacement, which eliminates a free cysteine to thereby reduce aggregation). For example, the modified u-PA polypeptide of SEQ ID NO:21 cleaves human C3 in the assay described herein with a an EC₅₀ of 19 nM, compared to 3380 nM for the wild-type protease domain of SEQ ID NO:5.

[0486] 4. Disease Models

[0487] The modified u-PA polypeptides provided herein can be used in any clinically relevant disease model known to one of skill in the art to determine their effects on complement-mediated diseases or disorders. Exemplary assays include, but are not limited to, assays for transplantation, including in vitro assays with human islet cells (Tjernberg et al. (2008) Transplantation 85:1193-1199) and ex vivo assays with pig kidneys (Fiane et al. (1999) Xenotransplantation 6:52-65); bioincompatibility, including in vitro artificial surface-induced inflammation (Lappegard et al. (2008) J BiomedMater Res A 87:129-135; Lappegard et al. (2005) Ann Thorac Surg 79:917-923; Nilsson et al. (1998) Blood 92:1661-1667; Schmidt et al. (2003) JBiomedMater Res A 66:491-499); inflammation, including in vitro E. coli-induced inflammation (Mollnes et al. (2002) Blood 100:1867-1877) and heparin/protamine complex-induced inflammation in baboons (Soulika et al. (2000) Clin Immunol 96:212-221); age-related macular degeneration in rabbits and monkeys and rodents (Chi et al. (2010) Adv Exp Med Biol 703:127-135; Pennesi et al. (2012) Mol. Aspects Med. 33(4):487-509; Fletcher et al. (2014) Optm. Vis. Sci. 91(8):878-886; Forest et al., (2015) Disease Models and Mechanisms 8:421-427); and delayed graft function in pigs (Hanto et al., (2010) Am J Transplant 10(11):2421-2430) and dogs (Petrinec et al., (1996) Surgery 61:1331-1337).

### F. METHODS OF PRODUCING NUCLEIC ACIDS ENCODING MODIFIED U-PA POLYPEPTIDES THEREOF

[0488] Polypeptides of a modified u-PA polypeptide set forth herein can be obtained by methods well known in the art for protein purification and recombinant protein expression. Polypeptides also can be synthesized chemically. Modified or variant, including truncated forms, can be engineered from a wild type polypeptide using standard recombinant DNA methods. For example, modified u-PA polypeptides can be engineered from a wild type polypeptide, such as by site-directed mutagenesis.

[0489] 1. Isolation or Preparation of Nucleic Acids Encoding u-PA Polypeptides

[0490] Polypeptides can be cloned or isolated using any available methods known in the art for cloning and isolating nucleic acid molecules. Such methods include PCR amplification of nucleic acids and screening of libraries, including nucleic acid hybridization screening, antibody-based screening and activity-based screening. For example, when the polypeptides are produced by recombinant means, any method known to those of skill in the art for identification of nucleic acids that encode desired genes can be used. Any method available in the art can be used to obtain a full length or partial (i.e., encompassing the entire coding region) cDNA or genomic DNA clone encoding a u-PA, such as from a cell or tissue source.

[0491] Methods for amplification of nucleic acids can be used to isolate nucleic acid molecules encoding a desired polypeptide, including for example, polymerase chain reaction (PCR) methods. Exemplary of such methods include use of a Perkin-Elmer Cetus thermal cycler and Taq polymerase (Gene Amp). A nucleic acid containing material can be used as a starting material from which a desired polypeptide-encoding nucleic acid molecule can be isolated. For example, DNA and mRNA preparations, cell extracts, tissue extracts, fluid samples (e.g. blood, serum, saliva), and samples from healthy and/or diseased subjects can be used in amplification methods. The source can be from any eukaryotic species including, but not limited to, vertebrate, mammalian, human, porcine, bovine, feline, avian, equine, canine, and other primate sources. Nucleic acid libraries also can be used as a source of starting material. Primers can be designed to amplify a desired polypeptide. For example, primers can be designed based on expressed sequences from which a desired polypeptide is generated. Primers can be designed based on back-translation of a polypeptide amino acid sequence. If desired, degenerate primers can be used for amplification. Oligonucleotide primers that hybridize to sequences at the 3′ and 5′ termini of the desired sequence can be used as primers to amplify by PCR sequences from a nucleic acid sample. Primers can be used to amplify the entire full-length u-PA, or a truncated sequence thereof, such as a nucleic acid encoding any of the soluble u-PA polypeptides provided herein. Nucleic acid molecules generated by amplification can be sequenced and confirmed to encode a desired polypeptide.

[0492] Additional nucleotide sequences can be joined to a polypeptide-encoding nucleic acid molecule, including linker sequences containing restriction endonuclease sites for the purpose of cloning the synthetic gene into a vector, for example, a protein expression vector or a vector designed for the amplification of the core protein coding DNA sequences. Furthermore, additional nucleotide sequences specifying functional DNA elements can be operatively linked to a polypeptide-encoding nucleic acid molecule. Examples of such sequences include, but are not limited to, promoter sequences designed to facilitate intracellular protein expression, and secretion sequences, for example heterologous signal sequences, designed to facilitate protein secretion. Such sequences are known to those of skill in the art. Additional nucleotide residue sequences such as sequences of bases specifying protein binding regions also can be linked to enzyme-encoding nucleic acid molecules. Such regions include, but are not limited to, sequences of residues that facilitate or encode proteins that facilitate uptake of an enzyme into specific target cells, or otherwise alter pharmacokinetics of a product of a synthetic gene.

[0493] Tags and/or other moieties can be added, for example, to aid in detection or affinity purification of the polypeptide. For example, additional nucleotide residue sequences such as sequences of bases specifying an epitope tag or other detectable marker also can be linked to enzyme-encoding nucleic acid molecules. Exemplary of such sequences include nucleic acid sequences encoding a SUMO tag or His tag or Flag Tag.

[0494] The identified and isolated nucleic acids then can be inserted into an appropriate cloning vector. A large number of vector-host systems known in the art can be used. Possible vectors include, but are not limited to, plasmids or modified viruses, but the vector system must be compatible with the host cell used. Such vectors include, but are not limited to, bacteriophages such as lambda derivatives, or plasmids such as pCMV4, pBR322 or pUC plasmid derivatives or the Bluescript vector (Stratagene, La Jolla, Calif.). The insertion into a cloning vector can, for example, be accomplished by ligating the DNA fragment into a cloning vector which has complementary cohesive termini. Insertion can be effected using TOPO cloning vectors (Invitrogen, Carlsbad, Calif.).

[0495] If the complementary restriction sites used to fragment the DNA are not present in the cloning vector, the ends of the DNA molecules can be enzymatically modified. Alternatively, any site desired can be produced by ligating nucleotide sequences (linkers) onto the DNA termini; these ligated linkers can contain specific chemically synthesized oligonucleotides encoding restriction endonuclease recognition sequences. In an alternative method, the cleaved vector and protein gene can be modified by homopolymeric tailing.

[0496] Recombinant molecules can be introduced into host cells via, for example, transformation, transfection, infection, electroporation and sonoporation, so that many copies of the gene sequence are generated. In specific embodiments, transformation of host cells with recombinant DNA molecules that incorporate the isolated protein gene, cDNA, or synthesized DNA sequence enables generation of multiple copies of the gene. Thus, the gene can be obtained in large quantities by growing transformants, isolating the recombinant DNA molecules from the transformants and, when necessary, retrieving the inserted gene from the isolated recombinant DNA.

[0497] In addition to recombinant production, modified u-PA polypeptides provided herein, can be produced by direct peptide synthesis using solid-phase techniques (see e.g., Stewart et al. (1969) Solid-Phase Peptide Synthesis, WH Freeman Co., San Francisco; Merrifield J (1963) J Am Chem Soc., 85:2149-2154). In vitro protein synthesis can be performed using manual techniques or by automation. Automated synthesis can be achieved, for example, using Applied Biosystems 431A Peptide Synthesizer (Perkin Elmer, Foster City Calif.) in accordance with the instructions provided by the manufacturer. Various fragments of a polypeptide can be chemically synthesized separately and combined using chemical methods.

[0498] Also provided herein, are methods of expression of active or activated or activatable forms of the modified u-PA polypeptides, such as two chain activated forms and dimers. As discussed and described herein, and exemplified in Examples 14-16, the nucleic acid encoding modified u-PA polypeptide fusion proteins can be prepared. The nucleic acids encode the modified u-PA protease domains, linked to nucleic acid encoding other sequences, including, but are limited to, secretion signals, such as, for example, the u-PA signal sequence, an IgG kapp chain signal sequence, and an IL-2 signal sequence, the N-terminal portion of u-PA (to produce full-length u-PA), activation sequences, such as for example, the u-PA activation sequence or a furin sequence, and fusion partners, such as an albumin, to alter a property of the u-PA, such as serum half-life, and/or a sequence, such as a His Tag and/or SUMO to increase expression and/or facilitate isolation. These nucleic acid molecules can be expressed in suitable host cells, well known to those of skill in the art, for production of the modified u-PA and/or fusion protein. Generally the nucleic acids encode a signal sequence or other trafficking sequence for secretion or trafficking to an locus for purification. Including nucleic acid encoding an activation sequence can be used to produce an activated form of the modified u-PA polypeptide.

[0499] 2. Generation of Mutant or Modified Nucleic Acid and Encoding Polypeptides

[0500] The modifications provided herein can be made by standard recombinant DNA techniques such as are routine to one of skill in the art. Any method known in the art to effect mutation of any one or more amino acids in a target protein can be employed. Methods include standard site-directed mutagenesis (using e.g. a kit, such as QuikChange available from Stratagene) of encoding nucleic acid molecules, or by solid phase polypeptide synthesis methods.

[0501] 3. Vectors and Cells

[0502] For recombinant expression of one or more of the desired proteins, such as any modified u-PA polypeptide described herein, the nucleic acid containing all or a portion of the nucleotide sequence encoding the protein can be inserted into an appropriate expression vector, i. e., a vector that contains the necessary elements for the transcription and translation of the inserted protein coding sequence. The necessary transcriptional and translational signals also can be supplied by the native promoter for enzyme genes, and/or their flanking regions.

[0503] Also provided are vectors that contain a nucleic acid encoding the enzyme. Cells containing the vectors also are provided. The cells include eukaryotic and prokaryotic cells, and the vectors are any suitable for use therein. Generally, the cell is a cell that is capable of effecting glycosylation of the encoded protein.

[0504] Prokaryotic and eukaryotic cells containing the vectors are provided. Such cells include bacterial cells, yeast cells, fungal cells, Archea, plant cells, insect cells and animal cells. The cells are used to produce a protein thereof by growing the above-described cells under conditions whereby the encoded protein is expressed by the cell, and recovering the expressed protein. For purposes herein, for example, the enzyme can be secreted into the medium.

[0505] A host cell strain can be chosen for its ability to modulate the expression of the inserted sequences or to process the expressed protein in the desired fashion. Such modifications of the polypeptide include, but are not limited to, acetylation, carboxylation, glycosylation, phosphorylation, lipidation and acylation. Post-translational processing can impact the folding and/or function of the polypeptide. Different host cells, such as, but not limited to, CHO (DG44, DXB11, CHO-K1), HeLa, MCDK, 293 and WI38 have specific cellular machinery and characteristic mechanisms for such post-translational activities and can be chosen to ensure the correct modification and processing of the introduced protein. Generally, the choice of cell is one that is capable of introducing N-linked glycosylation into the expressed polypeptide. Hence, eukaryotic cells containing the vectors are provided. Exemplary of eukaryotic cells are mammalian Chinese Hamster Ovary (CHO) cells. For example, CHO cells deficient in dihydrofolate reductase (e.g. DG44 cells) are used to produce polypeptides provided herein.

[0506] Provided are vectors that contain a sequence of nucleotides that encodes the modified u-PA polypeptide, coupled to the native or heterologous signal sequence, as well as multiple copies thereof. The vectors can be selected for expression of the enzyme protein in the cell or such that the enzyme protein is expressed as a secreted protein.

[0507] In one embodiment, vectors containing a sequence of nucleotides that encodes a polypeptide that has protease activity and contains all or a portion of the protease domain, or multiple copies thereof, are provided. Also provided are vectors that contain a sequence of nucleotides that encodes the protease domain and additional portions of a protease protein up to and including a full length protease protein, as well as multiple copies thereof. The vectors can be selected for expression of the scaffold or modified protease protein or protease domain thereof in the cell or such that the protease protein is expressed as a secreted protein. When the protease domain is expressed the nucleic acid is linked to nucleic acid encoding a secretion signal, such as the Saccharomyces cerevisiae a-mating factor signal sequence or a portion thereof, or the native signal sequence.

[0508] A variety of host-vector systems can be used to express the protein coding sequence. These include, but are not limited to, mammalian cell systems infected with virus (e.g. vaccinia virus, adenovirus and other viruses); insect cell systems infected with virus (e.g. baculovirus); microorganisms such as yeast containing yeast vectors; or bacteria transformed with bacteriophage, DNA, plasmid DNA, or cosmid DNA. The expression elements of vectors vary in their strengths and specificities. Depending on the host-vector system used, any one of a number of suitable transcription and translation elements can be used.

[0509] Any methods known to those of skill in the art for the insertion of DNA fragments into a vector can be used to construct expression vectors containing a chimeric gene containing appropriate transcriptional/translational control signals and protein coding sequences. These methods can include in vitro recombinant DNA and synthetic techniques and in vivo recombinants (genetic recombination). Expression of nucleic acid sequences encoding protein, or domains, derivatives, fragments or homologs thereof, can be regulated by a second nucleic acid sequence so that the genes or fragments thereof are expressed in a host transformed with the recombinant DNA molecule(s). For example, expression of the proteins can be controlled by any promoter/enhancer known in the art. In a specific embodiment, the promoter is not native to the genes for a desired protein. Promoters which can be used include, but are not limited to, the SV40 early promoter (Bernoist and Chambon, Nature 290:304-310 (1981)), the promoter contained in the 3′ long terminal repeat of Rous sarcoma virus (Yamamoto et al. Cell 22:787-797 (1980)), the herpes thymidine kinase promoter (Wagner et al., Proc. Natl. Acad. Sci. USA 78:1441-1445 (1981)), the regulatory sequences of the metallothionein gene (Brinster et al., Nature 296:39-42 (1982)); prokaryotic expression vectors such as the β-lactamase promoter (Jay et al., (1981) Proc. Natl. Acad. Sci. USA 78:5543) or the tac promoter (DeBoer et al., Proc. Natl. Acad. Sci. USA 80:21-25 (1983); see also “Useful Proteins from Recombinant Bacteria”: in Scientific American 242:79-94 (1980)); plant expression vectors containing the nopaline synthetase promoter (Herrara-Estrella et al., Nature 303:209-213 (1984)) or the cauliflower mosaic virus 35S RNA promoter (Garder et al., Nucleic Acids Res. 9:2871 (1981)), and the promoter of the photosynthetic enzyme ribulose bisphosphate carboxylase (Herrera-Estrella et al., Nature 310:115-120 (1984)); promoter elements from yeast and other fungi such as the Gal4 promoter, the alcohol dehydrogenase promoter, the phosphoglycerol kinase promoter, the alkaline phosphatase promoter, and the following animal transcriptional control regions that exhibit tissue specificity and have been used in transgenic animals: elastase I gene control region which is active in pancreatic acinar cells (Swift et al., Cell 38:639-646 (1984); Ornitz et al., Cold Spring Harbor Symp. Quant. Biol. 50:399-409 (1986); MacDonald, Hepatology 7:425-515 (1987)); insulin gene control region which is active in pancreatic beta cells (Hanahan et al., Nature 315:115-122 (1985)), immunoglobulin gene control region which is active in lymphoid cells (Grosschedl et al., Cell 38:647-658 (1984); Adams et al., Nature 318:533-538 (1985); Alexander et al., Mol. Cell Biol. 7:1436-1444 (1987)), mouse mammary tumor virus control region which is active in testicular, breast, lymphoid and mast cells (Leder et al., Cell 45:485-495 (1986)), albumin gene control region which is active in liver (Pinckert et al., Genes and Devel. 1:268-276 (1987)), alpha-fetoprotein gene control region which is active in liver (Krumlauf et al., Mol. Cell. Biol. 5:1639-1648 (1985); Hammer et al., Science 235:53-58 (1987)), alpha-1 antitrypsin gene control region which is active in liver (Kelsey et al., Genes and Devel. 1:161-171 (1987)), beta globin gene control region which is active in myeloid cells (Magram et al., Nature 315:338-340 (1985); Kollias et al., Cell 46:89-94 (1986)), myelin basic protein gene control region which is active in oligodendrocyte cells of the brain (Readhead et al., Cell 48:703-712 (1987)), myosin light chain-2 gene control region which is active in skeletal muscle (Shani, Nature 314:283-286 (1985)), and gonadotrophic releasing hormone gene control region which is active in gonadotrophs of the hypothalamus (Mason et al., Science 234:1372-1378 (1986)).

[0510] In a specific embodiment, a vector is used that contains a promoter operably linked to nucleic acids encoding a desired protein, or a domain, fragment, derivative or homolog thereof, one or more origins of replication, and optionally, one or more selectable markers (e.g., an antibiotic resistance gene). Depending on the expression system, specific initiation signals also are required for efficient translation of a u-PA sequence. These signals include the ATG initiation codon and adjacent sequences. In cases where the initiation codon and upstream sequences of u-PA or catalytically active fragments thereof are inserted into the appropriate expression vector, no additional translational control signals are needed. In cases where only coding sequence, or a portion thereof, is inserted, exogenous transcriptional control signals including the ATG initiation codon must be provided. Furthermore, the initiation codon must be in the correct reading frame to ensure transcription of the entire insert. Exogenous transcriptional elements and initiation codons can be of various origins, natural and synthetic. The efficiency of expression can be enhanced by the inclusion of enhancers appropriate to the cell system in use (Scharf et al. (1994) Results Probl Cell Differ 20:125-62; Bittner et al. (1987) Methods in Enzymol, 153:516-544).

[0511] Exemplary plasmid vectors for transformation of E. coli cells, include, for example, the pQE expression vectors (available from Qiagen®, Valencia, Calif.; see also literature published by Qiagen® describing the system). pQE vectors have a phage T5 promoter (recognized by E. coli RNA polymerase) and a double lac operator repression module to provide tightly regulated, high-level expression of recombinant proteins in E. coli, a synthetic ribosomal binding site (RBS II) for efficient translation, a 6×His tag coding sequence, to and Ti transcriptional terminators, ColE1 origin of replication, and a beta-lactamase gene for conferring ampicillin resistance. The pQE vectors enable placement of a 6×His tag at either the N- or C-terminus of the recombinant protein. Such plasmids include pQE 32, pQE 30, and pQE 31 which provide multiple cloning sites for all three reading frames and provide for the expression of N-terminally 6×His-tagged proteins. Other exemplary plasmid vectors for transformation of E. coli cells, include, for example, the pET expression vectors (see, U.S. Pat. No. 4,952,496; available from Novagen®, Madison, Wis.; see, also literature published by Novagen® describing the system). Such plasmids include pET 11a, which contains the T71ac promoter, T7 terminator, the inducible E. coli lac operator, and the lac repressor gene; pET 12a-c, which contains the T7 promoter, T7 terminator, and the E. coli ompT secretion signal; and pET 15b and pET19b (Novagen®, Madison, Wis.), which contain a His-Tag™ leader sequence for use in purification with a His column and a thrombin cleavage site that permits cleavage following purification over the column, the T7-lac promoter region and the T7 terminator.

[0512] Typically, vectors can be plasmid, viral, or others known in the art, used for expression of the modified u-PA polypeptide in vivo or in vitro. For example, the modified u-PA polypeptide is expressed in mammalian cells, including, for example, Chinese Hamster Ovary (CHO) cells.

[0513] Viral vectors, such as adenovirus, retrovirus or vaccinia virus vectors, can be employed. In some examples, the vector is a defective or attenuated retroviral or other viral vector (see U.S. Pat. No. 4,980,286). For example, a retroviral vector can be used (see Miller et al., Meth. Enzymol. 217: 581-599 (1993)). These retroviral vectors have been modified to delete retroviral sequences that are not necessary for packaging of the viral genome and integration into host cell DNA. In some examples, viruses armed with a nucleic acid encoding a modified u-PA polypeptide can facilitate their replication and spread within a target tissue. The virus also can be a lytic virus or a non-lytic virus where the virus selectively replicates under a tissue specific promoter. As the viruses replicate, the coexpression of the u-PA polypeptide with viral genes will facilitate the spread of the virus in vivo.

[0514] 4. Expression

[0515] Modified u-PA polypeptides can be produced by any method known to those of skill in the art including in vivo and in vitro methods. Desired proteins can be expressed in any organism suitable to produce the required amounts and forms of the proteins, such as for example, needed for administration and treatment. Expression hosts include prokaryotic and eukaryotic organisms such as E. coli, yeast, plants, insect cells, mammalian cells, including human cell lines and transgenic animals. Expression hosts can differ in their protein production levels as well as the types of post-translational modifications that are present on the expressed proteins. The choice of expression host can be made based on these and other factors, such as regulatory and safety considerations, production costs and the need and methods for purification.

[0516] Many expression vectors are available and known to those of skill in the art and can be used for expression of proteins. The choice of expression vector will be influenced by the choice of host expression system. In general, expression vectors can include transcriptional promoters and optionally enhancers, translational signals, and transcriptional and translational termination signals. Expression vectors that are used for stable transformation typically have a selectable marker which allows selection and maintenance of the transformed cells. In some cases, an origin of replication can be used to amplify the copy number of the vector.

[0517] Modified u-PA polypeptides also can be utilized or expressed as protein fusions. For example, an enzyme fusion can be generated to add additional functionality to an enzyme. Examples of enzyme fusion proteins include, but are not limited to, fusions of a signal sequence, a tag such as for localization, e.g. a his₆ tag or a myc tag, or a tag for purification, for example, a GST fusion, and a sequence for directing protein secretion and/or membrane association.

[0518] For example, a modified u-PA polypeptide described herein is one that is generated by expression of a nucleic acid molecule encoding the protease domain set forth in any one of SEQ ID NOS: 1-6, 8-44 and 52-75 or a sequence of amino acids that exhibits at least 65%, 70%, 75%, 80%, 84%, 90%, 91%, 92%, 93%, 94%, 95%, 96%, 97%, 98%, or 99% sequence identity to a sequence set forth in any of SEQ ID NOS: 1-6, 8-44 and 52-75.

[0519] For long-term, high-yield production of recombinant proteins, stable expression is desired. For example, cell lines that stably express a modified u-PA polypeptide can be transformed using expression vectors that contain viral origins of replication or endogenous expression elements and a selectable marker gene. Following the introduction of the vector, cells can be allowed to grow for 1-2 days in an enriched media before they are switched to selective media. The purpose of the selectable marker is to confer resistance to selection, and its presence allows growth and recovery of cells that successfully express the introduced sequences. Resistant cells of stably transformed cells can be proliferated using tissue culture techniques appropriate to the cell types.

[0520] Any number of selection systems can be used to recover transformed cell lines. These include, but are not limited to, the herpes simplex virus thymidine kinase (Wigler et al., (1977) Cell 11:223-232) and adenine phosphoribosyltransferase (Lowy I et al. (1980) Cell, 22:817-23) genes, which can be employed in TK- or APRT-cells, respectively. Also, antimetabolite, antibiotic or herbicide resistance can be used as the basis for selection. For example, DHFR, which confers resistance to methotrexate (Wigler M et al. (1980) Proc. Natl. Acad. Sci, 77:3567-70); npt, which confers resistance to the aminoglycosides neomycin and G-418 (Colbere-Garapin F et al. (1981) J. Mol. Biol., 150:1-14); and als or pat, which confer resistance to chlorsulfuron and phosphinotricin acetyltransferase, respectively, can be used. Additional selectable genes have been described, for example, trpB, which allows cells to utilize indole in place of typtophan, or hisD, which allows cells to utilize histinol in place of histidine (Hartman S C and R C Mulligan (1988) Proc. Natl. Acad. Sci, 85:8047-8051). Visible markers, such as but not limited to, anthocyanins, beta glucuronidase and its substrate, GUS, and luciferase and its substrate luciferin, also can be used to identify transformants and also to quantify the amount of transient or stable protein expression attributable to a particular vector system (Rhodes C A et al. (1995) Methods Mol. Biol. 55:121-131).

[0521] The presence and expression of u-PA polypeptides can be monitored. For example, detection of a functional polypeptide can be determined by testing the conditioned media for hyaluronidase enzyme activity under appropriate conditions. Exemplary assays to assess the solubility and activity of expressed proteins are provided herein.

[0522] a. Prokaryotic Cells

[0523] Prokaryotes, especially E. coli, provide a system for producing large amounts of proteins. Transformation of E. coli is a simple and rapid technique well known to those of skill in the art. Expression vectors for E. coli can contain inducible promoters; such promoters are useful for inducing high levels of protein expression and for expressing proteins that exhibit some toxicity to the host cells. Examples of inducible promoters include the lac promoter, the trp promoter, the hybrid tac promoter, the T7 and SP6 RNA promoters and the temperature regulated λPL promoter.

[0524] Proteins, such as any provided herein, can be expressed in the cytoplasmic environment of E. coli. The cytoplasm is a reducing environment and for some molecules, this can result in the formation of insoluble inclusion bodies. Reducing agents such as dithiothreotol and β-mercaptoethanol and denaturants, such as guanidine-HCl and urea can be used to resolubilize the proteins. An alternative approach is the expression of proteins in the periplasmic space of bacteria which provides an oxidizing environment and chaperonin-like and disulfide isomerases and can lead to the production of soluble protein. Typically, a leader sequence is fused to the protein to be expressed which directs the protein to the periplasm. The leader is then removed by signal peptidases inside the periplasm. Examples of periplasmic-targeting leader sequences include the pelB leader from the pectate lyase gene and the leader derived from the alkaline phosphatase gene. In some cases, periplasmic expression allows leakage of the expressed protein into the culture medium. The secretion of proteins allows quick and simple purification from the culture supernatant. Proteins that are not secreted can be obtained from the periplasm by osmotic lysis. Similar to cytoplasmic expression, in some cases proteins can become insoluble and denaturants and reducing agents can be used to facilitate solubilization and refolding. Temperature of induction and growth also can influence expression levels and solubility, typically temperatures between 25° C. and 37° C. are used. Typically, bacteria produce aglycosylated proteins. Thus, if proteins require glycosylation for function, glycosylation can be added in vitro after purification from host cells.

[0525] b. Yeast Cells

[0526] Yeasts such as Saccharomyces cerevisae, Schizosaccharomyces pombe, Yarrowia lipolytica, Kluyveromyces lactis and Pichia pastoris are well known yeast expression hosts that can be used for production of proteins, such as any described herein. Yeast can be transformed with episomal replicating vectors or by stable chromosomal integration by homologous recombination. Typically, inducible promoters are used to regulate gene expression. Examples of such promoters include GAL1, GAL7 and GALS and metallothionein promoters, such as CUP1, AOX1 or other Pichia or other yeast promoter. Expression vectors often include a selectable marker such as LEU2, TRP 1, HIS3 and URA3 for selection and maintenance of the transformed DNA. Proteins expressed in yeast are often soluble. Co-expression with chaperonins such as Bip and protein disulfide isomerase can improve expression levels and solubility. Additionally, proteins expressed in yeast can be directed for secretion using secretion signal peptide fusions such as the yeast mating type alpha-factor secretion signal from Saccharomyces cerevisae and fusions with yeast cell surface proteins such as the Aga2p mating adhesion receptor or the Arxula adeninivorans glucoamylase. A protease cleavage site such as for the Kex-2 protease, can be engineered to remove the fused sequences from the expressed polypeptides as they exit the secretion pathway. Yeast also is capable of glycosylation at Asn-X-Ser/Thr motifs.

[0527] c. Insects and Insect Cells

[0528] Insect cells, particularly using baculovirus expression, are useful for expressing polypeptides such as u-PA polypeptides. Insect cells express high levels of protein and are capable of most of the post-translational modifications used by higher eukaryotes. Baculovirus have a restrictive host range which improves the safety and reduces regulatory concerns of eukaryotic expression. Typical expression vectors use a promoter for high level expression such as the polyhedrin promoter of baculovirus. Commonly used baculovirus systems include the baculoviruses such as Autographa californica nuclear polyhedrosis virus (AcNPV), and the Bombyx mori nuclear polyhedrosis virus (BmNPV) and an insect cell line such as Sf9 derived from Spodoptera frugiperda, Pseudaletia unipuncta (A7S) and Danaus plexippus (DpN1). For high-level expression, the nucleotide sequence of the molecule to be expressed is fused immediately downstream of the polyhedrin initiation codon of the virus. Mammalian secretion signals are accurately processed in insect cells and can be used to secrete the expressed protein into the culture medium. The cell lines Pseudaletia unipuncta (A7S) and Danaus plexippus (DpN1) produce proteins with glycosylation patterns similar to mammalian cell systems. Exemplary insect cells are those that have been altered to reduce immunogenicity, including those with “mammalianized” baculovirus expression vectors and those lacking the enzyme FT3.

[0529] An alternative expression system in insect cells is the use of stably transformed cells. Cell lines such as the Schnieder 2 (S2) and Kc cells (Drosophila melanogaster) and C7 cells (Aedes albopictus) can be used for expression. The Drosophila metallothionein promoter can be used to induce high levels of expression in the presence of heavy metal induction with cadmium or copper. Expression vectors are typically maintained by the use of selectable markers such as neomycin and hygromycin.

[0530] d. Mammalian Expression

[0531] Mammalian expression systems can be used to express proteins including U-PA polypeptides. Expression constructs can be transferred to mammalian cells by viral infection such as adenovirus or by direct DNA transfer such as liposomes, calcium phosphate, DEAE-dextran and by physical means such as electroporation and microinjection. Expression vectors for mammalian cells typically include an mRNA cap site, a TATA box, a translational initiation sequence (Kozak consensus sequence) and polyadenylation elements. IRES elements also can be added to permit bicistronic expression with another gene, such as a selectable marker. Such vectors often include transcriptional promoter-enhancers for high-level expression, for example the SV40 promoter-enhancer, the human cytomegalovirus (CMV) promoter and the long terminal repeat of Rous sarcoma virus (RSV). These promoter-enhancers are active in many cell types. Tissue and cell-type promoters and enhancer regions also can be used for expression. Exemplary promoter/enhancer regions include, but are not limited to, those from genes such as elastase I, insulin, immunoglobulin, mouse mammary tumor virus, albumin, alpha fetoprotein, alpha 1 antitrypsin, beta globin, myelin basic protein, myosin light chain 2, and gonadotropic releasing hormone gene control. Selectable markers can be used to select for and maintain cells with the expression construct. Examples of selectable marker genes include, but are not limited to, hygromycin B phosphotransferase, adenosine deaminase, xanthine-guanine phosphoribosyl transferase, aminoglycoside phosphotransferase, dihydrofolate reductase (DHFR) and thymidine kinase. For example, expression can be performed in the presence of methotrexate to select for only those cells expressing the DHFR gene. Fusion with cell surface signaling molecules such as TCR-ζ and FcERI-γ can direct expression of the proteins in an active state on the cell surface.

[0532] Many cell lines are available for mammalian expression including mouse, rat human, monkey, chicken and hamster cells. Exemplary cell lines include but are not limited to CHO, Balb/3T3, HeLa, MT2, mouse NS0 (nonsecreting) and other myeloma cell lines, hybridoma and heterohybridoma cell lines, lymphocytes, fibroblasts, Sp2/0, COS, NIH3T3, HEK293, 293S, 2B8, and HKB cells. Cell lines also are available adapted to serum-free media which facilitates purification of secreted proteins from the cell culture media. Examples include CHO-S cells (Invitrogen®, Carlsbad, Calif., cat #11619-012) and the serum free EBNA-1 cell line (Pham et al., (2003) Biotechnol. Bioeng. 84:332-42.). Cell lines also are available that are adapted to grow in special mediums optimized for maximal expression. For example, DG44 CHO cells are adapted to grow in suspension culture in a chemically defined, animal product-free medium.

[0533] e. Plants

[0534] Transgenic plant cells and plants can be used to express proteins such as any described herein. Expression constructs are typically transferred to plants using direct DNA transfer such as microprojectile bombardment and PEG-mediated transfer into protoplasts, and with agrobacterium-mediated transformation. Expression vectors can include promoter and enhancer sequences, transcriptional termination elements and translational control elements. Expression vectors and transformation techniques are usually divided between dicot hosts, such as Arabidopsis and tobacco, and monocot hosts, such as corn and rice. Examples of plant promoters used for expression include the cauliflower mosaic virus promoter, the nopaline syntase promoter, the ribose bisphosphate carboxylase promoter and the ubiquitin and UBQ3 promoters. Selectable markers such as hygromycin, phosphomannose isomerase and neomycin phosphotransferase are often used to facilitate selection and maintenance of transformed cells. Transformed plant cells can be maintained in culture as cells, aggregates (callus tissue) or regenerated into whole plants. Transgenic plant cells also can include algae engineered to produce hyaluronidase polypeptides. Because plants have different glycosylation patterns than mammalian cells, this can influence the choice of protein produced in these hosts.

[0535] 5. Purification

[0536] Host cells transformed with a nucleic acid sequence encoding a modified u-PA polypeptide can be cultured under conditions suitable for the expression and recovery of the encoded protein from cell culture. The protein produced by a recombinant cell is generally secreted, but may be contained intracellularly depending on the sequence and/or the vector used. As understood by those of skill in the art, expression vectors containing nucleic acid encoding u-PA can be designed with signal sequences that facilitate direct secretion of u-PA through prokaryotic or eukaryotic cell membrane.

[0537] Thus, methods for purification of polypeptides from host cells depend on the chosen host cells and expression systems. For secreted molecules, proteins are generally purified from the culture media after removing the cells. For intracellular expression, cells can be lysed and the proteins purified from the extract. When transgenic organisms such as transgenic plants and animals are used for expression, tissues or organs can be used as starting material to make a lysed cell extract. Additionally, transgenic animal production can include the production of polypeptides in milk or eggs, which can be collected, and if necessary, the proteins can be extracted and further purified using standard methods in the art.

[0538] Proteins, such as modified u-PA polypeptides, can be purified using standard protein purification techniques known in the art including but not limited to, SDS-PAGE, size fractionation and size exclusion chromatography, ammonium sulfate precipitation and ionic exchange chromatography, such as anion exchange. Affinity purification techniques also can be utilized to improve the efficiency and purity of the preparations. For example, antibodies, receptors and other molecules that bind u-PA proteins can be used in affinity purification.

[0539] Expression constructs also can be engineered to add an affinity tag to a protein such as a Small Ubiquitin-like Modifier (SUMO) tag, myc epitope, GST fusion or His6 and affinity purified with SUMO or myc antibody, glutathione resin and Ni-resin, respectively. Such tags can be joined to the nucleotide sequence encoding a u-PA as described elsewhere herein, which can facilitate purification of soluble proteins. For example, a modified u-PA polypeptide can be expressed as a recombinant protein with one or more additional polypeptide domains added to facilitate protein purification. Such purification facilitating domains include, but are not limited to, metal chelating peptides such as histidine-tryptophan modules that allow purification on immobilized metals, protein A domains that allow purification on immobilized immunoglobulin and the domain utilized in the FLAGS extension/affinity purification system (Immunex Corp., Seattle Wash.). The inclusion of a cleavable linker sequence such as Factor XA or enterokinase (Invitrogen®, San Diego, Calif.) between the purification domain and the expressed u-PA polypeptide is useful to facilitate purification. One such expression vector provides for expression of a fusion protein containing a u-PA polypeptide in and an enterokinase cleavage site. The Small Ubiquitin-like Modifier (SUMO) tag facilitates purification on IMIAC (immobilized metal ion affinity chromatography), while the enterokinase cleavage site provides a means for purifying the polypeptide from the fusion protein.

[0540] Purity can be assessed by any method known in the art including gel electrophoresis, orthogonal HPLC methods, staining and spectrophotometric techniques. The expressed and purified protein can be analyzed using any assay or method known to one of skill in the art, for example, any described in Section 3. These include assays based on the physical and/or functional properties of the protein, including, but not limited to, analysis by gel electrophoresis, immunoassay and assays of u-PA activity.

[0541] 6. Additional Modifications

[0542] The modified u-PA polypeptides provided herein can be modified to improve or alter pharmacokinetic and pharmacological properties. In particular, the modified u-PA polypeptides can be conjugated to a polymer, such as a PEG moiety or dextran or sialiation to reduce immungeniciaty and/or increase half-life in serum and other body fluids including vitreous humor.

[0543] a. PEGylation

[0544] Polyethylene glycol (PEG) is used in biomaterials, biotechnology and medicine primarily because PEG is a biocompatible, nontoxic, water-soluble polymer that is typically nonimmunogenic (Zhao and Harris, ACS Symposium Series 680: 458-72, 1997). In the area of drug delivery, PEG derivatives have been widely used in covalent attachment (i. e., “PEGylation”) to proteins to reduce immunogenicity, proteolysis and kidney clearance to increase serum half-life, and to enhance solubility (Zalipsky, Adv. Drug Del. Rev. 16:157-82, 1995). Similarly, PEG has been attached to low molecular weight, relatively hydrophobic drugs to enhance solubility, reduce toxicity and alter biodistribution. Typically, PEGylated drugs are injected as solutions.

[0545] A related application is synthesis of crosslinked degradable PEG networks or formulations for use in drug delivery since much of the same chemistry used in design of degradable, soluble drug carriers also can be used in design of degradable gels (Sawhney et al., Macromolecules 26: 581-87, 1993). It also is known that intermacromolecular complexes can be formed by mixing solutions of two complementary polymers. Such complexes are generally stabilized by electrostatic interactions (polyanion-polycation) and/or hydrogen bonds (polyacid-polybase) between the polymers involved, and/or by hydrophobic interactions between the polymers in an aqueous surrounding (Krupers et al., Eur. Polym J. 32:785-790, 1996). For example, mixing solutions of polyacrylic acid (PAAc) and polyethylene oxide (PEO) under the proper conditions results in the formation of complexes based mostly on hydrogen bonding. Dissociation of these complexes at physiologic conditions has been used for delivery of free drugs (i.e., non-PEGylated). Complexes of complementary polymers have been formed from homopolymers and copolymers.

[0546] Numerous reagents for PEGylation are known as are PEG moiety (PEGylated) therapeutic proteins. Such reagents include, but are not limited to, reaction of the polypeptide with N-hydroxysuccinimidyl (NHS) activated PEG, succinimidyl mPEG, mPEG₂-N-hydroxysuccinimide, mPEG succinimidyl alpha-methylbutanoate, mPEG succinimidyl propionate, mPEG succinimidyl butanoate, mPEG carboxymethyl 3-hydroxybutanoic acid succinimidyl ester, homobifunctional PEG-succinimidyl propionate, homobifunctional PEG propionaldehyde, homobifunctional PEG butyraldehyde, PEG maleimide, PEG hydrazide, p-nitrophenyl-carbonate PEG, mPEG-benzotriazole carbonate, propionaldehyde PEG, mPEG butryaldehyde, branched mPEG₂ butyraldehyde, mPEG acetyl, mPEG piperidone, mPEG methylketone, mPEG “linkerless” maleimide, mPEG vinyl sulfone, mPEG thiol, mPEG orthopyridylthioester, mPEG orthopyridyl disulfide, Fmoc-PEG-NHS, Boc-PEG-NHS, vinylsulfone PEG-NHS, acrylate PEG-NHS, fluorescein PEG-NHS, and biotin PEG-NHS (see, e.g., Monfardini et al., Bioconjugate Chem. 6:62-69, 1995; Veronese et al., J. Bioactive Compatible Polymers 12:197-207, 1997; U.S. Pat. Nos. 5,672,662; 5,932,462; 6,495,659; 6,737,505; 4,002,531; 4,179,337; 5,122,614; 5,324,844; 5,446,090; 5,612,460; 5,643,575; 5,766,581; 5,795,569; 5,808,096; 5,900,461; 5,919,455; 5,985,263; 5,990,237; 6,113,906; 6,214,966; 6,258,351; 6,340,742; 6,413,507; 6,420,339; 6,437,025; 6,448,369; 6,461,802; 6,828,401; 6,858,736; U.S. 2001/0021763; U.S. 2001/0044526; U.S. 2001/0046481; U.S. 2002/0052430; U.S. 2002/0072573; U.S. 2002/0156047; U.S. 2003/0114647; U.S. 2003/0143596; U.S. 2003/0158333; U.S. 2003/0220447; U.S. 2004/0013637; US 2004/0235734; WO0500360; U.S. 2005/0114037; U.S. 2005/0171328; U.S. 2005/0209416; EP 01064951; EP 0822199; WO 00176640; WO 0002017; WO 0249673; WO 9428024; and WO 0187925).

[0547] In one example, the polyethylene glycol has a molecular weight ranging from about 3 kD to about 50 kD, and typically from about 5 kD to about 30 kD. Covalent attachment of the PEG to the drug (known as “PEGylation”) can be accomplished by known chemical synthesis techniques. For example, the PEGylation of protein can be accomplished by reacting NHS-activated PEG with the protein under suitable reaction conditions.

[0548] While numerous reactions have been described for PEGylation, those that are most generally applicable confer directionality, use mild reaction conditions, and do not necessitate extensive downstream processing to remove toxic catalysts or bi-products. For instance, monomethoxy PEG (mPEG) has only one reactive terminal hydroxyl, and thus its use limits some of the heterogeneity of the resulting PEG-protein product mixture. Activation of the hydroxyl group at the end of the polymer opposite to the terminal methoxy group is generally necessary to accomplish efficient protein PEGylation, with the aim being to make the derivatised PEG more susceptible to nucleophilic attack. The attacking nucleophile is usually the epsilon-amino group of a lysyl residue, but other amines also can react (e.g. the N-terminal alpha-amine or the ring amines of histidine) if local conditions are favorable. A more directed attachment is possible in proteins containing a single lysine or cysteine. The latter residue can be targeted by PEG-maleimide for thiol-specific modification. Alternatively, PEG hydrazide can be reacted with a periodate oxidized hyaluronan-degrading enzyme and reduced in the presence of NaCNBH₃. More specifically, PEGylated CMP sugars can be reacted with a hyaluronan-degrading enzyme in the presence of appropriate glycosyl-transferases. One technique is the “PEGylation” technique where a number of polymeric molecules are coupled to the polypeptide in question. When using this technique the immune system has difficulties in recognizing the epitopes on the polypeptide's surface responsible for the formation of antibodies, thereby reducing the immune response. For polypeptides introduced directly into the circulatory system of the human body to give a particular physiological effect (i. e. pharmaceuticals) the typical potential immune response is an IgG and/or IgM response, while polypeptides which are inhaled through the respiratory system (i.e. industrial polypeptide) potentially can cause an IgE response (i.e. allergic response). One of the theories explaining the reduced immune response is that the polymeric molecule(s) shield(s) epitope(s) on the surface of the polypeptide responsible for the immune response leading to antibody formation. Another theory or at least a partial factor is that the heavier the conjugate is, the more reduced immune response is obtained.

[0549] Typically, to make the PEGylated modified u-PA polypeptide provided herein, PEG moieties are conjugated, via covalent attachment, to the polypeptides. The Modified u-PA polypeptides for PEGylation can be prepared without the C122S replacement; instead the C122 can serve as a site for conjugate to a PEG moiety and/or for forming a desired disulfide bond, such as for a two chain activated form or an dimer.

[0550] Techniques for PEGylation include, but are not limited to, specialized linkers and coupling chemistries (see, e.g, Harris, Adv. Drug Deliv. Rev. 54:459-476, 2002), attachment of multiple PEG moieties to a single conjugation site (such as via use of branched PEGs; see, e.g., Veronese et al., Bioorg. Med. Chem. Lett. 12:177-180, 2002), site-specific PEGylation and/or mono-PEGylation (see, e.g, Chapman et al., Nature Biotech. 17:780-783, 1999), and site-directed enzymatic PEGylation (see, e.g, Sato, Adv. Drug Deliv. Rev., 54:487-504, 2002). Methods and techniques described in the art can produce proteins having 1, 2, 3, 4, 5, 6, 7, 8, 9, 10 or more than 10 PEG or PEG derivatives attached to a single protein molecule (see, e.g., U.S. Patent Publication No. 2006/0104968).

[0551] b. Fusion Proteins and Other Conjugates

[0552] Provided herein are conjugates of u-PA and the modified u-PA polypeptides provided herein. Exemplary such conjugates are the fusion proteins exemplified in Examples 14-16. As described herein, some of the conjugates when activated by cleavage of an included activation polypeptide forms a two-chain activated u-PA polypeptide; others, such as those that contain Fc domains can form tow chains via linkage of the Fc domains. Others contain sequences, such as SUMO and HIS-SUMO that facilitate expression and isolation/purification. Examples 14 and 15, and also FIGS. 1-4, describe and depict resulting conjugates. For use as pharmaceuticals, the modified u-PA polypeptides generally are provided in activated form, such as a two chain activated form. It is understood that the following discussion describes the fusion polypeptides that can include signal sequences and other regulatory sequences that will not appear in the product as produced. In particular, the fusion polypeptides can include activation sequences, whereby upon cleavage, the resulting polypeptide is a two chain activated polypeptide. It is the activated forms of the polypeptides that, in general, will be the pharmaceutical product administered to a subject.

[0553] i. Exemplary Fusion Proteins and Other Protein Conjugates

[0554] The modified u-PA polypeptides provided herein can be fused to other polypeptides and portions thereof and to moieties to confer desired properties, such as increased serum half-life, and/or reduced immunogenicity, and/or other properties. These include, for example, fusion to albumin, fusion to targeting moieties, such as antibodies and antigen binding fragments thereof, fusion to immunoglobulins, Fc fusions, modification of glycosylation patterns, farsnylation and other such modifications (see, Strohl (2015) BioDrugs 29:215-239 for a review of a variety of fusion proteins for improving pharmacokinetic properties of therapeutic proteins). Any such modalities for altering pharmacological properties of therapeutics can be applied to the modified u-PA polypeptides provided herein. Generally, where the modification is a polypeptide or portion thereof, the modified u-PA is produced as a fusion protein. For non-polypeptidic modifications, such as pegylation, modification is effected on isolated protein. The modified u-PA polypeptides include those that have Cys at residue 122 (by chymotrypsin number), to provide sites for podt-translational or post-purification modification. The modified u-PA polypeptides include those that are full-length and catalytically active portions thereof, such as the protease domain, or the mature polypeptide or the activated two-chain polypeptide.

[0555] Fusion proteins containing a modified u-PA polypeptide provided herein and one or more other polypeptides also are provided. Pharmaceutical compositions containing such fusion proteins formulated for administration by a suitable route are provided. Fusion proteins are formed by linking in any order a modified u-PA polypeptide and another polypeptide, such as an antibody or fragment thereof, growth factor, receptor, ligand and other such agent for the purposes of facilitating the purification of a protease, altering the pharmacodynamic properties of a modified u-PA polypeptide by directing the u-PA polypeptide to a targeted cell or tissue, and/or increasing the expression or secretion of a u-PA polypeptide. Within a u-PA polypeptide fusion protein, the u-PA polypeptide can be all or a catalytically active portion thereof of a u-PA polypeptide or the catalytically active portion of a u-PA polypeptide and a further portion of u-PA that is not full-length u-PA. Fusion proteins provided herein retain substantially all of their specificity and/or selectivity for complement protein C3. Generally, u-PA fusion polypeptides retain at least about 30%, 40%, 50%, 60%, 70%, 80%, 85%, 90% or 95% substrate specificity and/or selectivity compared with a non-fusion u-PA polypeptide, including 96%, 97%, 98%, 99% or greater substrate specificity compared with a non-fusion u-PA polypeptide.

[0556] ii. Construct Generation

[0557] A u-PA fusion protein can be produced by standard recombinant techniques. For example, DNA fragments encoding the different polypeptide sequences can be ligated together in-frame in accordance with conventional techniques, e.g., by employing blunt-ended or stagger-ended termini for ligation, restriction enzyme digestion to provide for appropriate termini, filling-in of cohesive ends as appropriate, alkaline phosphatase treatment to avoid undesirable joining, and enzymatic ligation. In another embodiment, the fusion gene can be synthesized by conventional techniques including automated DNA synthesizers. Alternatively, PCR amplification of gene fragments can be carried out using anchor primers that give rise to complementary overhangs between two consecutive gene fragments that can subsequently be annealed and reamplified to generate a chimeric gene sequence (see, e.g., Ausubel et al. (eds.) CURRENT PROTOCOLS IN MOLECULAR BIOLOGY, John Wiley & Sons, 1992). Many expression vectors are commercially available that encode a fusion moiety (e.g., a his tag, SUMO polypeptide, or GST polypeptide). A u-PA-encoding nucleic acid can be cloned into such an expression vector such that the fusion moiety is linked in-frame to the u-PA polypeptide.

[0558] Exemplary expression vectors include any mammalian expression vector such as, for example, pCMV. For bacterial expression, such vectors include pBR322, pUC, pSKF, pET23D, and fusion vectors such as MBP, GST and LacZ. Other eukaryotic vectors, for example any containing regulatory elements from eukaryotic viruses, can be used as eukaryotic expression vectors. These include, for example, SV40 vectors, papilloma virus vectors, and vectors derived from Epstein-Bar virus. Exemplary eukaryotic vectors include pMSG, pAV009/A+, pMT010/A+, pMAMneo-5, baculovirus pDSCE, and any other vector allowing expression of proteins under the direction of the CMV promoter, SV40 early promoter, SV40 late promoter, metallothionein promoter, murine mammary tumor virus promoter, Rous sarcoma virus promoter, polyhedron promoter, or other promoters shown effective for expression in eukaryotes.

[0559] iii. Signal Sequence

[0560] u-PA fusion proteins can contain a signal peptide (SP or signal sequence or localization signal or leader peptide) for directing transport of the protease. Signal peptides are sequence motifs found at the N-terminus of nascent proteins that target proteins for translocation across the endoplasmic reticulum membrane to their specific destination within the cell, or outside the cell if the proteins are to be secreted. Thus, SP selection and modifying the SP influences protein targeting (Zhang et al. (2005) J Gene Med 7:354-365). Optimized SPs have been developed for more efficient activity. Computational models and algorithms have been developed to predict SP efficacy and define SP consensus sequences (Burdukiewicz et al. (2018) Int J Mol Sci 19(12): 3709; Peason et al. (1988) Proc. Natl. Acad. Sci. U.S.A. 85:2444-2448).

[0561] Various proteins are known to have SPs, including but not limited to: receptors (nuclear, 4 transmembrane, G protein-coupled and tyrosine kinase), cytokines (chemokines), hormones (growth and differentiation factors), neuropeptides and vasomediators, protein kinases, phosphatases, phospholipases, phosphodiesterases, nucleotide cyclases, matrix molecules (adhesion, cadherin, extracellular matrix molecules, integrin, and selectin), G proteins, ion channels (calcium, chloride, potassium, and sodium), proteases, transporter/pumps (amino acid, protein, sugar, metal and vitamin; calcium, phosphate, potassium, and sodium) and regulatory proteins. In some examples the original signal peptide is optimized for the secretion of the protein in the desired host cell selected for production. A u-PA polypeptide, such as a modified u-PA protease domain provided herein, can be fused, directly or indirectly, to a non-uPA signal peptide for u-PA targeting.

[0562] The signal peptides may be signal peptides of antibodies such as the signal peptides of the heavy chains of antibodies and the light chain of antibodies. The isotype of the antibody may comprise, but is not limited, to IgG, IgM, IgD, IgA and IgE. Thus, the heavy chain may comprise gamma, mu, delta, alpha and epsilon heavy chains, and the light chain may comprise a kappa or a lambda light chain. The u-PA fusion proteins set forth herein can be prepared with an antibody signal peptide such as the human immunoglobulin light chain kappa (κ) leader signal peptide sequence, such as the signal sequence set forth in SEQ ID NO: 999.

[0563] Other exemplary signal peptides are those derived from human interleukin-2 (IL-2) which are used extensively for research and protein production (Bamford et al. (1998) J Immunol 160:4418; Komada et al. (1999) Biol Pharm Bull 22:846). Modified IL-2 SPs with increased basicity and hydrophobicity have been developed that increased secretion of fused proteins by up to 3.5 fold (Zhang et al. (2005) J. Gene Med. 7:354). The u-PA fusion proteins herein can be prepared, for example, with an IL-2 signal peptide, such as the human IL2 Signal Peptide (hIL2SP), such as, for example, the signal sequence set forth in SEQ ID NO: 1000.

[0564] Exemplary u-PA fusion proteins set forth herein can contain a signal peptide for directing transport of the protease. For example, the u-PA fusion polypeptides set forth as SEQ ID NOs:1004, 1005, 1010, 1011, 1014-1018, 1036 and 1040 contain a human immunoglobulin light chain kappa (κ) leader signal peptide sequence (SEQ ID NO: 999). In another example, the u-PA fusion polypeptides set forth as SEQ ID NOs:1006-1009, 1012, 1013, 1034 and 1035 contain a human IL2 Signal Peptide (hIL2SP) sequence (SEQ ID NO: 1000).

[0565] iii. Exemplary Fusion Proteins and Peptide Linkers

[0566] Linkage of a modified u-PA polypeptide and another polypeptide can be effected directly, or indirectly via a linker. In one example, linkage can be by chemical linkage, such as via heterobifunctional agents or thiol linkages or other such linkages. Fusion of a u-PA polypeptide to another polypeptide can be to the N- or C-terminus of the modified u-PA polypeptide, such as the modified u-PA protease domain. Non-limiting examples of polypeptides that can be used in fusion proteins with a u-PA polypeptide provided herein include, for example, a Fc domain from immunoglobulin G, serum albumin (i. e., human serum albumin)), scFv that binds to Collagen IIm (C2scFv), Hyaluronic Acid Binding Dmain (HABD), GST (glutathione S-transferase) polypeptide, a his tag (i.e., HHHHHH), a Small Ubiquitin-like Modifier (SUMO) tag, the influenza hemagglutinin (HA) tag polypeptide and its antibody 12CA5, and/or a heterologous signal sequence (e.g., from thrombin or a mouse Ig kappy chain V-III region (IgGκ) or human Interleukin-2 (hIL2)). The fusion proteins can contain additional components, such as E. coli maltose binding protein (MBP) that aid in uptake of the protein by cells (see, International PCT application Publication No. WO 01/32711).

[0567] Peptide linkers can be included in u-PA fusion proteins. In one example, peptide linkers can be fused to the C-terminal end of a first polypeptide and the N-terminal of a second polypeptide. This structure can be repeated a plurality times such that at least one, and optionally 2, 3, 4 or more polypeptides are linked to one another via peptide linkers at their respective termini. For example, a fusion protein can include a sequence X-Y-Z, where X is the wild-type or modified u-PA catalytic domain, Y is a peptide linker, and Z is all or part of fusion partner (e.g., HSA, Fc, HABD, or C2 scFv). In some instances, X is all of a modified u-PA including the N-terminus of u-PA, and the protease domain of u-PA. In other instances, X is part of a modified u-PA including the 12 amino acids directly upstream of the u-PA protease domain, and the u-PA protease domain. In another example, the polypeptide can include the sequence A-X-Y-Z, where “A” is another fusion partner, such as a polypeptide, such as SUMO or HIS-SUMO, that facilitates expression and/or isolation of the resulting polypeptide.

[0568] Peptide linkers generally include Gly, Ser, and combinations thereof, or Ala and Proline. Linkers generally contain from two up to 20 or 25 residues. Examples of peptide linkers include, but are not limited to: -Gly-Gly-, GSG, AGS (SEQ ID NO: 1003), GGGGS (SEQ ID NO:1001), GGSSGG (SEQ ID NO:1002), SSSSG (SEQ ID NO:1024), GKSSGSGSESKS (SEQ ID NO:1025), GGSTSGSGKSSEGKG (SEQ ID NO: 1026), GSTSGSGKSSSEGSGSTKG (SEQ ID NO: 1027), GSTSGSGKPGSGEGSTKG (SEQ ID NO: 1028), EGKSSGSGSESKEF (SEQ ID NO: 1029), or AlaAlaProAla or (AlaAlaProAla)n (SEQ ID NO: 1030), where n is 1 to 6, such as 1, 2, 3, 4, 5 or 6.

[0569] Linking moieties are described, for example, in Huston et al. (1988) Proc. Natl. Acad. Sci. U.S.A. 85:5879-5883, Whitlow et al. (1993) Protein Engineering 6:989-995, and Newton et al., (1996) Biochemistry 35:545-553. Other suitable peptide linkers include any of those described in U.S. Pat. No. 4,751,180 or 4,935,233. A polynucleotide encoding a desired peptide linker can be inserted between, and in the same reading frame as a polynucleotide encoding all or part of a u-PA including the u-PA protease domain, using any suitable conventional technique. In one example, the fusion protein contains a u-PA polypeptide, for example a u-PA protease domain, and a fusion partner, such as HSA, Fc, HABD, or C2 scFv, separated by a peptide linker(s).

[0570] Exemplary u-PA fusion polypeptides include a linker at the C-terminus of the u-PA protease domain which links the u-PA protease domain to a C-terminal fusion partner, such as HSA or Fc. u-PA-linker-Fc and u-PA-linker-HSA molecules optionally can contain an epitope tag and/or a signal for expression and secretion. An exemplary u-PA-linker-Fc fusion protein is set forth in SEQ ID NO: 1018, which contains human immunoglobulin light chain kappa ( ) leader signal peptide sequence (SEQ ID NO: 999), HIS-SUMO (SEQ ID NO: 990), a u-PA protease domain (SEQ ID NO: 21), a linker (SEQ ID NO: 1002), and an Fc fragment of the human IgG1 heavy chain (SEQ ID NO:992).

[0571] In other examples, the exemplary u-PA fusion proteins are u-PA-linker-HSA fusion polypeptides, such as the fusion proteins set forth as SEQ ID NOs: 1015-1017. For example, the fusion polypeptide set forth in SEQ ID NO:1015 contains human immunoglobulin light chain kappa (κ) leader signal peptide sequence (SEQ ID NO: 999), the N-terminal domain of u-PA (SEQ ID NO: 1042), the wild-type u-PA activation sequence (SEQ ID NO: 997), a u-PA protease domain (SEQ ID NO: 987), a linker (SEQ ID NO: 1002), and HSA (SEQ ID NO:991). In another example, the fusion polypeptide set forth in SEQ ID NO: 1016 contains human immunoglobulin light chain kappa (κ) leader signal peptide sequence (SEQ ID NO: 999), a furin activation sequence in the u-PA activation sequence (SEQ ID NO:996), a u-PA protease domain (SEQ ID NO: 21), a linker (SEQ ID NO: 1002), and HSA (SEQ ID NO:991). In another example, the fusion polypeptide set forth in SEQ ID NO:1017 contains human immunoglobulin light chain kappa (κ) leader signal peptide sequence (SEQ ID NO: 999), HIS-SUMO (SEQ ID NO: 990), a u-PA protease domain (SEQ ID NO: 21), a linker (SEQ ID NO: 1002), and HSA (SEQ ID NO:991).

[0572] In other examples the linker is at the N-terminus of the u-PA protease domain and links the protease domain to an N-terminal fusion partner. For example, the fusion protein may contain an N-terminal Fc linked to u-PA. An exemplary FC-linker-u-PA fusion polypeptide is set forth in SEQ ID NO: 1004, which contains human immunoglobulin light chain kappa (κ) leader signal peptide sequence (SEQ ID NO: 999), an Fc fragment of the human IgG1 heavy chain (SEQ ID NO:992), a linker (SEQ ID NO: 1003), the wild-type u-PA activation sequence (SEQ ID NO: 997), and a u-PA protease domain (SEQ ID NO:987).

[0573] iv. Fusion Partners

[0574] Fusion proteins, such as fusion proteins containing fusion to Fc, fusion to human serum albumin (HSA), fusion to a single-chain fragment variable (scFv) antibody, such as scFv that binds Collagen II (C2scFv), fusion to HABD, and fusion to other polypeptides, are known modifications for improving pharmacokinetics of peptide or biologic drugs. Also among these is conjugation to either linear or branched-chain monomethoxy poly-ethylene glycol (PEG), resulting in increases in the molecular mass and hydrodynamic radius, and a decrease in the rate of glomerular filtration by the kidney. Another approach to for improving pharmacokinetic parameters includes modification of glycosylation patterns, resulting in reduced clearance and extension of half-life.

[0575] Exemplary u-PA fusion polypeptides include placement of the fusion partner (i.e., HSA, HABD, C2 scFv or Fc)N-terminal to the u-PA protease domain or C-terminal to the u-PA protease domain. An exemplary u-PA fusion protein where the fusion partner is N-terminal to the u-PA protease domain is set forth in SEQ ID NO: 1004. Exemplary u-PA fusion proteins where the fusion partner is C-terminal to the u-PA protease domain are set forth in SEQ ID NOs: 1006-1018.

[0576] (a) Fc Domain

[0577] Some examples of u-PA fusion proteins include the heavy chain of an immunoglobulin polypeptide, most usually the constant domains of the heavy chain. Exemplary sequences of heavy chain constant regions for human IgG sub-types are set forth in SEQ ID NO: 45 (IgG1), SEQ ID NO: 1020 (IgG2), SEQ ID NO: 1021 (IgG3), and SEQ ID NO: 1022 (IgG4). For example, for the exemplary heavy chain constant region set forth in SEQ ID NO: 45, the CH1 domain corresponds to amino acids 1-98, the hinge region corresponds to amino acids 99-110, the C_{H}2 domain corresponds to amino acids 111-223, and the CH3 domain corresponds to amino acids 224-330.

[0578] In one example, a u-PA fusion protein can include the Fc region of an immunoglobulin polypeptide, such as human immunoglobulin. Typically, such a fusion retains at least a functionally active hinge, C_{H}2 and C_{H}3 domains of the constant region of an immunoglobulin heavy chain. For example, a full-length Fc sequence of IgG1 includes amino acids 105-330 of the sequence set forth in SEQ ID NO:45. Exemplary Fc sequences for hIgG1 are set forth in SEQ ID NO: 992 and 1023, and contain almost all of the hinge sequence corresponding to amino acids 100-110 of SEQ ID NO:45, and the complete sequence for the C_{H}2 and C_{H}3 domain as set forth in SEQ ID NO:45. Another exemplary Fc polypeptide is set forth in PCT application WO 93/10151, and is a single chain polypeptide extending from the N-terminal hinge region to the native C-terminus of the Fc region of a human IgG1 antibody (SEQ ID NO:50). The precise site at which the linkage is made is not critical: particular sites are well known and can be selected in order to optimize the biological activity, or stability of the u-PA polypeptide. For example, other exemplary Fc polypeptide sequences begin at amino acid C109 or P113 of the sequence set forth in SEQ ID NO: 45 (see e.g., U.S. Pub. No. 2006/0024298).

[0579] In addition to hIgG1 Fc, other Fc regions also can be included in the u-PA fusion proteins provided herein. For example, where effector functions mediated by Fc/FcγR interactions are to be minimized, fusion with IgG isotypes that poorly recruit complement or effector cells, such as for example, the Fc of IgG2 or IgG4, is contemplated. Additionally, the Fc fusions can contain immunoglobulin sequences that are substantially encoded by immunoglobulin genes belonging to any of the antibody classes, including, but not limited to IgG (including human subclasses IgG1, IgG2, IgG3, or IgG4), IgA (including human subclasses IgA1 and IgA2), IgD, IgE, and IgM classes of antibodies. Further, linkers can be used to covalently link Fc to another polypeptide to generate a Fc chimera.

[0580] Modified Fc domains also are contemplated herein for use in chimeras with u-PA fusion polypeptides. In some examples, the Fc region is modified such that it exhibits altered binding to an FcR so has to result altered (i. e. more or less) effector function than the effector function of an Fc region of a wild-type immunoglobulin heavy chain. Thus, a modified Fc domain can have altered affinity, including but not limited to, increased or low or no affinity for the Fc receptor. For example, the different IgG subclasses have different affinities for the FcγRs, with IgG1 and IgG3 typically binding substantially better to the receptors than IgG2 and IgG4. Different FcγRs mediate different effector functions. FcγR1, FcγRIIa/c, and FcγRIIIa are positive regulators of immune complex triggered activation, characterized by having an intracellular domain that has an immunoreceptor tyrosine-based activation motif (ITAM). FcγRIIb, however, has an immunoreceptor tyrosine-based inhibition motif (ITIM) and is therefore inhibitory. In some instances, an u-PA polypeptide-Fc fusion protein provided herein can be modified to enhance binding to the complement protein C1q. Further, an Fc can be modified to alter its binding to FcRn, thereby improving the pharmacokinetics of an u-PA-Fc fusion polypeptide. Thus, altering the affinity of an Fc region for a receptor can modulate the effector functions and/or pharmacokinetic properties associated by the Fc domain. Modified Fc domains are known to one of skill in the art and described in the literature, see e.g. U.S. Pat. No. 5,457,035; U.S. Patent Publication No. US 2006/0024298; and International Patent Publication No. WO 2005/063816 for exemplary modifications.

[0581] In some examples, a u-PA polypeptide multimer is formed. Typically, a polypeptide multimer is a dimer of two chimeric proteins created by linking, directly or indirectly, two of the same or different u-PA polypeptides, such as a u-PA protease domain, to an Fc polypeptide. In some examples, a gene fusion encoding the u-PA-Fc fusion protein is inserted into an appropriate expression vector. The resulting u-PA-Fc fusion proteins can be expressed in host cells transformed with the recombinant expression vector, and allowed to assemble much like antibody molecules, where interchain disulfide bonds form between the Fc moieties to yield divalent u-PA polypeptides.

[0582] u-PA fusion polypeptides containing Fc regions also can be engineered to include a tag with metal chelates or other epitope. The tagged domain can be used for rapid purification by metal-chelate chromatography, and/or by antibodies, to allow for detection of western blots, immunoprecipitation, or activity depletion/blocking in bioassays.

[0583] Exemplary u-PA-Fc fusion polypeptides include fusion of the u-PA protease domain and Fc. Exemplary u-PA-Fc fusion proteins are set forth in SEQ ID NOs: 1004, 1006, 1010, 1011, 1012 and 1018. The u-PA-Fc molecules optionally can contain an epitope tag or a signal for expression and secretion. For example, the exemplary u-PA-Fc fusion polypeptides set forth as SEQ ID NOs: 1004, 1010, and 1011 contain human immunoglobulin light chain kappa (κ) leader signal peptide sequence (SEQ ID NO: 999), an Fc fragment of the human IgG1 heavy chain (SEQ ID NO:992) and a u-PA protease domain (SEQ ID NO: 21 or 987) either N-terminal (SEQ ID NO:1004) or C-terminal (SEQ ID NOs:1010 and 1011) to the Fc. In another example, the exemplary u-PA-Fc fusion polypeptides set forth as SEQ ID NOs: 1006 and 1012 contain human IL2 Signal Peptide (hIL2SP) sequence (SEQ ID NO: 1000), a u-PA protease domain (SEQ ID NO: 5 or 21), and an Fc fragment of the human IgG1 heavy chain (SEQ ID NO:992)N-terminal to the u-PA protease domain.

[0584] (b) Serum Albumin

[0585] u-PA fusion proteins can be generated with albumin as a fusion partner in order to increase the half-life, stability, bioavailability, distribution and/or improve the pharmacokinetics of u-PA. Numerous products linked to human serum albumin (HSA) are approved for use as therapeutics, including use as cancer therapeutics and for treatment of type 2 diabetes (AlQahtani et al. (2019) Biomed and Pharmacotherapy 113:108750; Roscoe et al., (2018) Mol. Pharmaceutics 151:15046-5047; Strohl, W. R. (2015) BioDrugs 4:215-239). In some examples, the mature HSA protein, lacking the signal sequence and activation sequence is fused to a protein of interest. In some examples of a u-PA fusion protein, serum albumin, such as human serum albumin (HSA), is conjugated to the u-PA, such as the u-PA protease domain. An exemplary HSA is set forth in SEQ ID NO: 991.

[0586] u-PA-HSA fusion polypeptides include fusion of the u-PA protease domain and HSA. Exemplary u-PA-HSA fusion proteins are set forth in SEQ ID NOs: 1007 and 1013-1017. u-PA-HSA molecules optionally can contain an epitope tag and/or a signal for expression and secretion. For example, the exemplary u-PA-HSA fusion polypeptides set forth as SEQ ID NOs: 1014-1017 contain human immunoglobulin light chain kappa (κ) leader signal peptide sequence (SEQ ID NO: 999), a u-PA protease domain (SEQ ID NO: 987 or 21), and a C-terminal HSA (SEQ ID NO:991). In another example, the exemplary u-PA-HSA fusion polypeptide set forth as SEQ ID NO:1013 contains human IL2 Signal Peptide (hIL2SP) sequence (SEQ ID NO: 1000), the u-PA protease domain (SEQ ID NO:5), and a C-terminal HSA (SEQ ID NO:991).

[0587] (c) scFv that binds Collagen II (C2scFv)

[0588] Recombinant antibody fragments in the form of single-chain fragment variable (scFv) antibodies, such as a scFv that binds Collagen II (C2scFv), can be used as a fusion partner with u-PA. scFv antibodies produced from phage display can be fused to markers, or active or therapeutic proteins (Ahmad et al. (2012) Clin Dev Immunol 2012:980250). Fusion of scFvs can be used to increase yield and activity of conjugated proteins (Martin et al., (2006) BMC Biotech 6:46).

[0589] Single-chain fragment variable antibodies comprise heavy (V_{H}) and light (V_{L}) chain variable regions joined by a peptide linker or disulfide bond (Glockshuber et al. (1990) Biochemistry 29(6): 1362-1367). The peptide linker plays a critical role in folding of the polypeptide chain. Commonly utilized linkers comprise Gly and Ser residues for flexibility or Glu and Lys to enhance solubility (Whitlow et al. (1993) Protein Engineering 6(8):989-995).

[0590] scFvs can be fused to proteins for specific delivery to antigen-presenting cells (Ahmad et al. (2012) Clin Dev Immunol 2012:980250). For example, the scFv can be generated to target collagen II, such as for uses as research agents, and as a delivery agent of therapeutic molecules to sites expressing human collagen II. For example, the scFv is an isolated monoclonal antibody or fragment thereof that binds human collagen II, comprising a VH region and a VL region, where the C2scFv comprises an amino acid sequence having a sequence shown in SEQ ID NO: 993.

[0591] Exemplary u-PA-C2scFv fusion polypeptides include fusion of the u-PA protease domain and C2scFv. An exemplary u-PA-C2scFv fusion protein is set forth in SEQ ID NO: 1008. u-PA-C2scFv molecules optionally can contain an epitope tag or a signal for expression and secretion. For example, the exemplary u-PA-C2scFv fusion polypeptide set forth as SEQ ID NO:1008 contains a human IL2 Signal Peptide (hIL2SP) sequence (SEQ ID NO: 1000), a u-PA protease domain (SEQ ID NO:21), and a C-terminal C2scFv (SEQ ID NO:993).

[0592] (d) Hyaluronic Acid Binding Domain (HABD)

[0593] In some examples, the u-PA fusion proteins contain a HABD fusion partner, such as Tumor Necrosis factor-Stimulated Gene-6 (TSG-6), such as the TSG-6 set forth as SEQ ID NO: 994 (corresponding to amino acids 32-134 of human TSG-6; NCBI No. NP_009046.2). u-PA fusion proteins can be generated with a HABD, such as TSG-6, as a fusion partner in order to increase the half-life, stability, bioavailability, distribution and/or improve the pharmacokinetics of u-PA.

[0594] Tumor necrosis factor-Stimulated Gene-6 (TSG-6, tumor necrosis factor alpha-induced protein 6, TNFAIP6; NCBI No. NP_009046.2) is a ˜35 kDa secreted glycoprotein composed of a single N-terminal link module and C-terminal CUB domain. Expression of TSG-6 is induced in many cell types by inflammatory mediators, including cytokines and growths factors. Via its link module, which has been reported to contain approximately amino acids 35-132, TSG-6 is a potent inhibitor of polymorphonuclear leukocyte migration. TSG-6 forms a stable complex with the serine protease inhibitor Inter-alpha-Inhibitor (IαI) and potentiates the anti-plasmin activity of IαI. TSG-6 also is important for the formation and remodeling of HA-rich pericellular coats and extracellular matrices.

[0595] Exemplary u-PA-HABD fusion polypeptides include fusion of the u-PA protease domain and HABD. An exemplary u-PA-HABD fusion protein is set forth in SEQ ID NO: 1009. u-PA-HABD molecules can, optionally, contain an epitope tag or a signal for expression and secretion. For example, the exemplary u-PA-HABD fusion polypeptide set forth as SEQ ID NO: 1009 contains human IL2 Signal Peptide (hIL2SP) sequence (SEQ ID NO: 1000), a u-PA protease domain (SEQ ID NO:21), and a C-terminal HABD (SEQ ID NO:994).

[0596] v. Activation Sequences (sites)

[0597] Exemplary u-PA fusion proteins contain a site (sequence) for u-PA activation. For example, u-PA fusion proteins comprise wild-type u-PA sequence for auto-activation; contain furin sequence for activation during protein expression; or are activated after secretion signal cleavage, all generating the activated u-PA protease.

[0598] (a) Furin

[0599] Furin proteins have been implicated in the endoproteolytic maturation processing of inactive precursor proteins at single, paired or multiple basic consensus sites within the secretory pathway (Nakayama(1997) Biochem. J. 327:625-635; Seidah and Chretien, Current Opinions in Biotechnology (1997) 8:602-607). Upon transit of a newly synthesized precursor protein from the endoplasmic reticulum to the Golgi compartment, the propeptide is autocatalytically removed in a two-step processing event at a furin cleavage motif (Leduc et al. (1992) J. Biol. Chem 267:14304-14308; Anderson et al. (1997) EMBO 1508-1518). Furin requires a R-X-X-R site for cleavage, and optimum processing occurs at a R-X-K/R-R motif (Molloy et al. (1992) J. Biol Chem 267:16396-16402). Exemplary u-PA activation sequences, containing the furin RRKR cleavage sites, are set forth in SEQ ID NOs: 995 and 996.

[0600] u-PA fusion proteins may include a furin activation sequence (site)N-terminal to the u-PA protease domain, so that u-PA protein is activated during expression. u-PA activation during expression, such as by inclusion of a furin activation sequence in the u-PA activation sequence, is intended to remove the need for an activation step during downstream processing.

[0601] u-PA fusion polypeptides including a furin activation sequence and the u-PA protease domain were generated. Exemplary furin-u-PA proteins are set forth in SEQ ID NOs: 1010, 1014 and 1016. Furin activated u-PA molecules optionally contain a fusion partner, and/or a signal for expression and secretion. For example, the exemplary u-PA fusion proteins set forth as SEQ ID NOs: 1014 and 1016 contain human immunoglobulin light chain kappa (κ) leader signal peptide sequence (SEQ ID NO: 999), a furin activation sequence in the u-PA activation sequence (SEQ ID NO: 995 or 996), the u-PA protease domain (SEQ ID NO: 21 or 987), and HSA (SEQ ID NO:991). The u-PA fusion protein set forth as SEQ ID NO: 1014 further contains the N-terminus of u-PA (set forth as amino acids 21-178 of SEQ ID NO:1 or SEQ ID NO: 1042), N-terminal to the furin-u-PA protease domain with the u-PA protease domain set forth in SEQ ID NO: 987. In another example, u-PA fusion protein set forth as SEQ ID NO:1010 contains human immunoglobulin light chain kappa (κ) leader signal peptide sequence (SEQ ID NO: 999), a furin activation sequence in the u-PA activation sequence (SEQ ID NO: 995), the u-PA protease domain (SEQ ID NO: 21), and Fc (SEQ ID NO:992).

[0602] (b) u-Pa

[0603] u-PA zymogen activation occurs by cleavage of a single peptide bond N-terminal to the u-PA catalytic domain, initiating a conformational change in the protein. u-PA constructs generated herein can contain the 12 amino acid u-PA activation sequence (SEQ ID NO: 997) or a modified form thereof (SEQ ID NO: 998) or can contain an extended portion of the u-PA N-terminus including the activation sequence, such that the u-PA comprises the full-length mature polypeptide, such as the polypeptide set forth in SEQ ID NO: 3. In other examples, the u-PA comprises the N-terminus, such as the N-terminal region of u-PA set forth as amino acids 21-178 of SEQ ID NO: 1 or SEQ ID NO: 1042, and the 12 amino acid u-PA activation sequence (SEQ ID NO: 997) or a modified form of the u-PA activation sequence (SEQ ID NO: 998).

[0604] Fusion proteins containing the modified u-PA polypeptides provided herein have been prepared. u-PA fusion polypeptides including the wild-type or a modified u-PA activation sequence and the u-PA protease domain were generated. Exemplary u-PA proteins containing the wild-type u-PA activation sequence for activation are set forth in SEQ ID NOs: 1004, 1005, 1011, and 1015. The fusion peptides optionally can contain a fusion partner, and/or a signal for expression and/or secretion. For example, the exemplary u-PA fusion protein set forth as SEQ ID NO:1004 contains human immunoglobulin light chain kappa (κ) leader signal peptide sequence (SEQ ID NO: 999), Fc (SEQ ID NO:992), the u-PA activation sequence (SEQ ID NO:995), and the u-PA protease domain (SEQ ID NO: 987). In a further example, the u-PA fusion protein set forth as SEQ ID NO: 1005 contains the full-length mature u-PA sequence (SEQ ID NO: 3 with the modified protease domain set forth in SEQ ID NO: 987) and an N-terminal human immunoglobulin light chain kappa (κ) leader signal peptide sequence (SEQ ID NO: 999). In a further example, the u-PA fusion protein set forth as SEQ ID NO: 1011 contains an N-terminal human immunoglobulin light chain kappa (κ) leader signal peptide sequence (SEQ ID NO: 999), the full-length mature u-PA sequence (SEQ ID NO: 3 with the modified protease domain set forth in SEQ ID NO: 987), and Fc (SEQ ID NO: 992). In another example, the u-PA fusion protein set forth as SEQ ID NO:1015 contains human immunoglobulin light chain kappa (κ) leader signal peptide sequence (SEQ ID NO: 999), the N-terminus of u-PA (set forth as amino acids 21-178 of SEQ ID NO:1) including the u-PA activation sequence, the u-PA protease domain (SEQ ID NO: 987), and HSA (SEQ ID NO:991). Modified u-PA polypeptides, such as those of SEQ ID NOs: 1006, 1007, 1009 and 1010, upon expression, demonstrated u-PA protease activity. Modified u-PA with a furin activation sequence N-terminal to u-PA with an Ig FC fusion at the C-terminus (such as set forth in SEQ ID NO: 1010) showed the highest activity.

[0605] vi. Purification Tags

[0606] Exemplary u-PA fusion proteins contain a tag for purification of the u-PA or u-PA fusion protein. Exemplary tags for purification of u-PA fusion proteins are set forth in Section F, above. Exemplary u-PA fusion proteins can comprise a SUMO or His sequence for purification.

[0607] (a) His Tag

[0608] u-PA fusion proteins may include a His tag, such as the 6×His set forth in SEQ ID NO: 989, and the u-PA protease domain.

[0609] u-PA fusion polypeptides including a His purification tag and the u-PA protease domain were generated. Exemplary HIS-u-PA fusion proteins are set forth in SEQ ID NOs: 1017 and 1018. His tagged u-PA molecules optionally can contain a fusion partner, and/or a signal for expression and secretion. For example, the exemplary His-u-PA fusion protein set forth as SEQ ID NO: 1017 contains human immunoglobulin light chain kappa (κ) leader signal peptide sequence (SEQ ID NO: 999), 6×His (SEQ ID NO:989), SUMO (SEQ ID NO:1031), the u-PA protease domain (SEQ ID NO: 21), and HSA (SEQ ID NO:991). In another example, the exemplary His tagged-u-PA fusion protein set forth as SEQ ID NO: 1018 contains human immunoglobulin light chain kappa (κ) leader signal peptide sequence (SEQ ID NO: 999), 6×His (SEQ ID NO:989), SUMO (SEQ ID NO:1031), the u-PA protease domain (SEQ ID NO: 21), and Fc (SEQ ID NO:992).

[0610] (b) SUMO

[0611] u-PA fusion proteins can include a His tag and/or SUMO sequences for accumulation in inclusion bodies can be include. For example, the HIS-SUMO sequence set forth in SEQ ID NO: 990, and the u-PA protease domain, can be linked to the full-length modified u-PA polypeptide, or to a catalytically active portion thereof, such to the protease domain, or to a larger portion of the modified u-PA polypeptide. u-PA fusion polypeptides including His-SUMO tags and the u-PA protease domain were generated. Exemplary HIS-SUMO-u-PA proteins are set forth in SEQ ID NOs: 1017 and 1018. HIS-SUMO tagged u-PA molecules optionally can contain a fusion partner, and/or a signal for expression and secretion. For example, the His-SUMO-u-PA fusion protein set forth as SEQ ID NO: 1017 contains human immunoglobulin light chain kappa (κ) leader signal peptide sequence (SEQ ID NO: 999), 6×His (SEQ ID NO:989), SUMO (SEQ ID NO:1031), the u-PA protease domain (SEQ ID NO: 21), and HSA (SEQ ID NO:991). In another example, the exemplary His-SUMO-u-PA fusion protein set forth as SEQ ID NO: 1018 contains human immunoglobulin light chain kappa (κ) leader signal peptide sequence (SEQ ID NO: 999), 6×His (SEQ ID NO:989), SUMO (SEQ ID NO:1031), the u-PA protease domain (SEQ ID NO: 21), and Fc (SEQ ID NO:992).

[0612] 7. Nucleic Acid Molecules

[0613] Nucleic acid molecules encoding u-PA polypeptides are provided herein. Nucleic acid molecules include allelic variants or splice variants of any encoded u-PA polypeptide, or catalytically active portion thereof. In one embodiment, nucleic acid molecules provided herein have at least 50, 55, 60, 65, 70, 75, 80, 85, 90, 91, 92, 93, 94, 95, 96, 97, 98 or 99% sequence identity to any nucleic acid encoded u-PA polypeptide or catalytically active portion thereof. In another embodiment, a nucleic acid molecule can include those with degenerate codon sequences of any of the u-PA polypeptides or catalytically active portions thereof such as those provided herein.

[0614] Nucleic acid molecules, or fusion proteins containing a catalytically active portion of a nucleic acid molecule, operably-linked to a promoter, such as an inducible promoter for expression in mammalian cells also are provided. Such promoters include, but are not limited to, CMV and SV40 promoters; adenovirus promoters, such as the E2 gene promoter, which is responsive to the HPV E7 oncoprotein; a PV promoter, such as the PBV p89 promoter that is responsive to the PV E2 protein; and other promoters that are activated by the HIV or PV or oncogenes.

[0615] A u-PA protease provided herein, also can be delivered to the cells in gene transfer vectors. The transfer vectors also can encode additional other therapeutic agent(s) for treatment of the disease or disorder, such as Rheumatoid Arthritis or cardiovascular disease or AMD or DGF, for which the protease is administered. Transfer vectors encoding a protease can be used systemically, by administering the nucleic acid to a subject. For example, the transfer vector can be a viral vector, such as an adenovirus vector. Vectors encoding a protease also can be incorporated into stem cells and such stem cells administered to a subject such as by transplanting or engrafting the stem cells at sites for therapy. For example, mesenchymal stem cells (MSCs) can be engineered to express a protease and such MSCs engrafted at a transplant site for therapy.

### G. COMPOSITIONS, FORMULATIONS AND DOSAGES

[0616] Pharmaceutical compositions containing modified u-PA polypeptides, modified u-PA fusion proteins or encoding nucleic acid molecules, can be formulated in any conventional manner by mixing a selected amount of the polypeptide with one or more physiologically acceptable carriers or excipients. In most embodiments, the modified u-PA polypeptide or fusion protein will be in an activated form in the composition for administration. Thus, for example, the polypeptides will be two chain activated forms or, where the fusion protein contains a multimerization domain, the protein can be a multimer, such as a dimer.

[0617] Selection of the carrier or excipient is within the skill of the administering professional and can depend upon a number of parameters. These include, for example, the mode of administration (i.e., systemic, oral, nasal, pulmonary, local, topical or any other mode) and disorder treated. The pharmaceutical compositions provided herein can be formulated for single dosage (direct) administration or for dilution or other modification. The concentrations of the compounds in the formulations are effective for delivery of an amount, upon administration, that is effective for the intended treatment. Typically, the compositions are formulated for single dosage administration. To formulate a composition, the weight fraction of a compound or mixture thereof is dissolved, suspended, dispersed or otherwise mixed in a selected vehicle at an effective concentration such that the treated condition is relieved or ameliorated. Pharmaceutical carriers or vehicles suitable for administration of the compounds provided herein include any such carriers known to those skilled in the art to be suitable for the particular mode of administration.

[0618] 1. Administration of Modified u-PA Polypeptides

[0619] For purposes of this section, modified u-PA polypeptides refer to u-PA polypeptides that contain modifications, such as the modified protease domains, and include the conjugates, such as fusion proteins. The polypeptides can be formulated as the sole pharmaceutically active ingredient in the composition or can be combined with other active ingredients. The polypeptides can be targeted for delivery, such as by conjugation to a targeting agent, such as an antibody. Liposomal suspensions, including tissue-targeted liposomes, also can be suitable as pharmaceutically acceptable carriers. These can be prepared according to methods known to those skilled in the art. For example, liposome formulations can be prepared as described in U.S. Pat. No. 4,522,811. Liposomal delivery also can include slow release formulations, including pharmaceutical matrices such as collagen gels and liposomes modified with fibronectin (see, for example, Weiner et al. (1985) J Pharm Sci. 74(9): 922-5).

[0620] The active compound is included in the pharmaceutically acceptable carrier in an amount sufficient to exert a therapeutically useful effect in the absence of undesirable side effects on the subject treated. The therapeutically effective concentration can be determined empirically by testing the compounds in known in vitro and in vivo systems, such as the assays provided herein.

[0621] The u-PA polypeptides provided herein (i. e. active compounds) can be administered in vitro, ex vivo, or in vivo by contacting a mixture, such as a body fluid or other tissue sample, with a u-PA polypeptide provided herein, including any of the modified u-PA polypeptides provided herein. For example, when administering a compound ex vivo, a body fluid, such as the vitreous, or tissue sample from a subject can be contacted with the u-PA polypeptides that are coated on a tube or filter, such as for example, a true or filter in a bypass machine. When administering in vivo, the active compounds can be administered by any appropriate route, for example, orally, nasally, pulmonary, parenterally, intravenously, intradermally, intravitreally, intraretinally, subretinally, periocularly, subcutaneously, or topically, in liquid, semi-liquid or solid form and are formulated in a manner suitable for each route of administration. Determination of dosage is within the skill of the physician, and can be a function of the particular disorder, route of administration and subject. Exemplary dosages, include for example 0.1-1 mg.

[0622] The modified u-PA polypeptide and physiologically acceptable salts and solvates can be formulated for administration by inhalation (either through the mouth or the nose), oral, transdermal, pulmonary, parenteral or rectal administration. For administration by inhalation, the modified u-PA polypeptide can be delivered in the form of an aerosol spray presentation from pressurized packs or a nebulizer with the use of a suitable propellant, e.g., dichlorodifluoromethane, trichlorofluoromethane, dichlorotetrafluoroethane, carbon dioxide or other suitable gas. In the case of a pressurized aerosol, the dosage unit can be determined by providing a valve to deliver a metered amount. Capsules and cartridges of, e.g., gelatin for use in an inhaler or insufflator, can be formulated containing a powder mix of a therapeutic compound and a suitable powder base such as lactose or starch.

[0623] For pulmonary administration to the lungs, the modified u-PA polypeptide can be delivered in the form of an aerosol spray presentation from a nebulizer, turbonebulizer, or microprocessor-controlled metered dose oral inhaler with the use of a suitable propellant. Generally, particle size of the aerosol is small, such as in the range of 0.5 to 5 microns. In the case of a pharmaceutical composition formulated for pulmonary administration, detergent surfactants are not typically used. Pulmonary drug delivery is a promising non-invasive method of systemic administration. The lungs represent an attractive route for drug delivery, mainly due to the high surface area for absorption, thin alveolar epithelium, extensive vascularization, lack of hepatic first-pass metabolism, and relatively low metabolic activity.

[0624] For oral administration, the pharmaceutical compositions can take the form of, for example, tablets, pills, liquid suspensions, or capsules prepared by conventional means with pharmaceutically acceptable excipients such as binding agents (e.g., pregelatinized maize starch, polyvinylpyrrolidone or hydroxypropyl methylcellulose); fillers (e.g., lactose, microcrystalline cellulose or calcium hydrogen phosphate); lubricants (e.g., magnesium stearate, talc or silica); disintegrants (e.g., potato starch or sodium starch glycolate); or wetting agents (e.g., sodium lauryl sulfate). The tablets can be coated by methods well known in the art. Liquid preparations for oral administration can take the form of, for example, solutions, syrups or suspensions, or they can be presented as a dry product for constitution with water or other suitable vehicle before use. Such liquid preparations can be prepared by conventional means with pharmaceutically acceptable additives such as suspending agents (e.g., sorbitol syrup, cellulose derivatives or hydrogenated edible fats); emulsifying agents (e.g., lecithin or acacia); non-aqueous vehicles (e.g., almond oil, oily esters, ethyl alcohol or fractionated vegetable oils); and preservatives (e.g., methyl or propyl-p-hydroxybenzoates or sorbic acid). The preparations also can contain buffer salts, flavoring, coloring and sweetening agents as appropriate.

[0625] Preparations for oral administration can be formulated for controlled release of the active compound. For buccal administration the compositions can take the form of tablets or lozenges formulated in conventional manner.

[0626] The modified u-PA polypeptides can be formulated as a depot preparation. Such long-acting formulations can be administered by implantation (for example, subcutaneously or intramuscularly) or by intramuscular injection. Thus, for example, the therapeutic compounds can be formulated with suitable polymeric or hydrophobic materials (for example, as an emulsion in an acceptable oil) or ion exchange resins, or as sparingly soluble derivatives, for example, as a sparingly soluble salt.

[0627] The modified u-PA polypeptide can be formulated for parenteral administration by injection (e.g., by bolus injection or continuous infusion). Formulations for injection can be presented in unit dosage form (e.g., in ampoules or in multi-dose containers) with an added preservative. The compositions can take such forms as suspensions, solutions or emulsions in oily or aqueous vehicles and can contain formulatory agents such as suspending, stabilizing and/or dispersing agents. Alternatively, the active ingredient can be in powder-lyophilized form for constitution with a suitable vehicle, e.g., sterile pyrogen-free water, before use.

[0628] The modified u-PA polypeptides can be formulated for ocular or opthalmic delivery. Ocular drug delivery may be, for example, topical, oral or systemic, and/or injected. For example, a modified u-PA polypeptide(s) or pharmaceutical composition containing a modified u-PA polypeptide(s) may be administered topically, such as in the form of eye drops. In another example, a modified u-PA polypeptide(s) or pharmaceutical composition containing a modified u-PA polypeptide(s) can be administered by periocular and/or intravitreal or intraretinal or subretinal administration, such as, for example, by periocular, or intraretinal, or intravitreal injection(s).

[0629] The modified u-PA polypeptides or pharmaceutical composition containing modified u-PA polypeptides or nucleic acids encoding modified u-PA polypeptides can be formulated for systemic administration for treatment of DGF. In another example, the modified u-PA polypeptides or pharmaceutical composition containing modified u-PA polypeptides or nucleic acids encoding modified u-PA polypeptides are directly infused or injected into the kidney or into the tissues or organs adjacent or surrounding the transplanted kidney. The modified u-PA polypeptides or pharmaceutical composition containing modified u-PA polypeptides can be administered before the time of allograft transplantation or at the time of transplantation with administration continuing in a chronic fashion, and/or can be administered during a rejection episode in the event such an episode does occur.

[0630] The pharmaceutical compositions can be formulated for local or topical application, such as for topical application to the skin (transdermal) and mucous membranes, such as in the eye, in the form of gels, creams, and lotions and for application to the eye or for intracisternal or intraspinal application. Such solutions, particularly those intended for ophthalmic use, can be formulated as 0.01%-10% isotonic solutions and pH about 5-7 with appropriate salts. The compounds can be formulated as aerosols for topical application, such as by inhalation (see, for example, U.S. Pat. Nos. 4,044,126, 4,414,209 and 4,364,923, which describe aerosols for delivery of a steroid useful for treatment inflammatory diseases, particularly asthma).

[0631] The concentration of active compound in the drug composition depends on absorption, inactivation and excretion rates of the active compound, the dosage schedule, and amount administered as well as other factors known to those of skill in the art. As described further herein, dosages can be determined empirically using comparisons of properties and activities (e.g., cleavage of one or more complement proteins) of the modified u-PA polypeptide compared to the unmodified and/or wild type u-PA polypeptide.

[0632] The compositions, if desired, can be presented in a package, in a kit or dispenser device, that can contain one or more unit dosage forms containing the active ingredient. In some examples, the composition can be coated on a device, such as for example on a tube or filter in, for example, a bypass machine. The package, for example, contains metal or plastic foil, such as a blister pack. The pack or dispenser device can be accompanied by instructions for administration. The compositions containing the active agents can be packaged as articles of manufacture containing packaging material, an agent provided herein, and a label that indicates the disorder for which the agent is provided.

[0633] Also provided are compositions containing nucleic acid molecules, including expression vectors, encoding the u-PA polypeptides. In some embodiments, the compositions of nucleic acid molecules encoding the u-PA polypeptides and expression vectors encoding them are suitable for gene therapy. Rather than deliver the protein, nucleic acid can be administered in vivo, such as systemically or by other route, or ex vivo, such as by removal of cells, including lymphocytes, introduction of the nucleic acid therein, and reintroduction into the host or a compatible recipient.

[0634] 2. Administration of Nucleic Acids Encoding Modified u-PA Polypeptides (Gene Therapy)

[0635] The modified u-PA polypeptides can be delivered to cells and tissues by expression of nucleic acid molecules. The modified u-PA polypeptides can be administered as nucleic acid molecules encoding the modified u-PA polypeptides, including ex vivo techniques and direct in vivo expression. Nucleic acids can be delivered to cells and tissues by any method known to those of skill in the art. The isolated nucleic acid can be incorporated into vectors for further manipulation. Methods for administering u-PA polypeptides by expression of encoding nucleic acid molecules include administration of recombinant vectors. The vector can be designed to remain episomal, such as by inclusion of an origin of replication or can be designed to integrate into a chromosome in the cell.

[0636] u-PA polypeptides also can be used in ex vivo gene expression therapy using vectors. Suitable gene therapy vectors and methods of delivery are known to those of skill in the art. For example, cells can be engineered to express a modified u-PA polypeptide, such as by integrating u-PA polypeptide encoding nucleic acid into a genomic location, either operatively linked to regulatory sequences or such that it is placed operatively linked to regulatory sequences in a genomic location. Such cells then can be administered locally or systemically to a subject, such as a patient in need of treatment. Exemplary vectors for in vivo and ex vivo gene therapy include viral vectors, and non-viral vectors such as, for example, liposomes or artificial chromosomes.

[0637] Viral vectors including, for example, adenoviruses, herpes viruses, adeno-associated viruses (AAV), retroviruses, such as lentiviruses, EBV, SV40, cytomegalovirus vectors, vaccinia virus vectors, and others designed for gene therapy can be employed. The vectors can be those that remain episomal or those that can integrate into chromosomes of the treated subject. A modified u-PA polypeptide can encoded in a viral vector, such as AAV, which is administered to a subject in need of treatment.

[0638] Virus vectors suitable for gene therapy include adenovirus, adeno-associated virus, retrovirus, lentivirus, and others noted above. For example, adenovirus expression technology is well-known in the art and adenovirus production and administration methods also are well known. Adenovirus serotypes are available, for example, from the American Type Culture Collection (ATCC®, Rockville, Md.). Adenovirus can be used ex vivo, for example, cells are isolated from a patient in need of treatment, and transduced with a modified u-PA polypeptide-expressing adenovirus vector. After a suitable culturing period, the transduced cells are administered to a subject, locally and/or systemically. Alternatively, u-PA polypeptide-expressing adenovirus particles are isolated and formulated in a pharmaceutically-acceptable carrier for delivery of a therapeutically effective amount to prevent, treat or ameliorate a disease or condition of a subject. In one embodiment, the disease to be treated is caused by complement activation. Typically, adenovirus particles are delivered at a dose ranging from 1 particle to 10¹⁴ particles per kilogram subject weight, generally between 10⁶ or 10⁸ particles to 10¹² particles per kilogram subject weight.

[0639] The nucleic acid molecules can be introduced into artificial chromosomes and other non-viral vectors. Artificial chromosomes, such as ACES (see, Lindenbaum et al. Nucleic Acids Res. (2004) 32(21):e172) can be engineered to encode and express the u-PA polypeptide. Briefly, mammalian artificial chromosomes (MACs) provide a means to introduce large payloads of genetic information into the cell in an autonomously replicating, non-integrating format. Unique among MACs, the mammalian satellite DNA-based Artificial Chromosome Expression System (ACES) can be reproducibly generated de novo in cell lines of different species and readily purified from the host cells' chromosomes. Purified mammalian ACEs can then be re-introduced into a variety of recipient cell lines where they have been stably maintained for extended periods in the absence of selective pressure using an ACE System. Using this approach, specific loading of one or two gene targets has been achieved in LMTK(−) and CHO cells.

[0640] Another method for introducing nucleic acids encoding the modified u-PA polypeptides is a two-step gene replacement technique in yeast, starting with a complete adenovirus genome (Ad2; Ketner et al. (1994) Proc. Natl. Acad. Sci. USA 91: 6186-6190) cloned in a Yeast Artificial Chromosome (YAC) and a plasmid containing adenovirus sequences to target a specific region in the YAC clone, an expression cassette for the gene of interest and a positive and negative selectable marker. YACs are of particular interest because they permit incorporation of larger genes. This approach can be used for construction of adenovirus-based vectors bearing nucleic acids encoding any of the described modified u-PA polypeptides for gene transfer to mammalian cells or whole animals.

[0641] The nucleic acids can be encapsulated in a vehicle, such as a liposome, or introduced into a cell, such as a bacterial cell, particularly an attenuated bacterium or introduced into a viral vector. For example, when liposomes are employed, proteins that bind to a cell surface membrane protein associated with endocytosis can be used for targeting and/or to facilitate uptake, e.g., capsid proteins or fragments thereof tropic for a particular cell type, antibodies for proteins which undergo internalization in cycling, and proteins that target intracellular localization and enhance intracellular half-life.

[0642] In some embodiments, it is desirable to provide a nucleic acid source with an agent that targets cells, such as an antibody specific for a cell surface membrane protein or a target cell, or a ligand for a receptor on a target cell. Polynucleotides and expression vectors provided herein can be made by any suitable method. Further provided are nucleic acid vectors containing nucleic acid molecules as described above. Further provided are nucleic acid vectors containing nucleic acid molecules as described above and cells containing these vectors.

[0643] For ex vivo and in vivo methods, nucleic acid molecules encoding the u-PA polypeptide are introduced into cells that are from a suitable donor or the subject to be treated. Cells into which a nucleic acid can be introduced for purposes of therapy include, for example, any desired, available cell type appropriate for the disease or condition to be treated including, but not limited to, epithelial cells, endothelial cells, keratinocytes, fibroblasts, muscle cells, hepatocytes; blood cells such as T lymphocytes, B lymphocytes, monocytes, macrophages, neutrophils, eosinophils, megakaryocytes, granulocytes; various stem or progenitor cells, including hematopoietic stem or progenitor cells, e.g., such as stem cells obtained from bone marrow, umbilical cord blood, peripheral blood, fetal liver, and other sources thereof.

[0644] For ex vivo treatment, cells from a donor compatible with the subject to be treated or cells from a subject to be treated are removed, the nucleic acid is introduced into these isolated cells and the modified cells are administered to the subject. Treatment includes direct administration, such as, for example, encapsulated within porous membranes, which are implanted into the patient (see, e.g., U.S. Pat. Nos. 4,892,538 and 5,283,187). Techniques suitable for the transfer of nucleic acid into mammalian cells in vitro include the use of liposomes and cationic lipids (e.g., DOTMA, DOPE and DC-Chol) electroporation, microinjection, cell fusion, DEAE-dextran, and calcium phosphate precipitation methods. Methods of DNA delivery can be used to express u-PA polypeptides in vivo. Such methods include liposome delivery of nucleic acids and naked DNA delivery, including local and systemic delivery such as using electroporation, ultrasound and calcium-phosphate delivery. Other techniques include microinjection, cell fusion, chromosome-mediated gene transfer, microcell-mediated gene transfer and spheroplast fusion.

[0645] In vivo expression of a modified u-PA polypeptide can be linked to expression of additional molecules. For example, expression of a u-PA polypeptide can be linked with expression of a cytotoxic product such as in an engineered virus or expressed in a cytotoxic virus. Such viruses can be targeted to a particular cell type that is a target for a therapeutic effect. The expressed u-PA polypeptide can be used to enhance the cytotoxicity of the virus.

[0646] In vivo expression of a u-PA polypeptide can include operatively linking a u-PA polypeptide encoding nucleic acid molecule to specific regulatory sequences such as a cell-specific or tissue-specific promoter. u-PA polypeptides also can be expressed from vectors that specifically infect and/or replicate in target cell types and/or tissues. Inducible promoters can be used to selectively regulate u-PA polypeptide expression.

[0647] Nucleic acid molecules, as naked nucleic acids or in vectors, artificial chromosomes, liposomes and other vehicles can be administered to the subject by systemic administration, topical, local and other routes of administration. When systemic and in vivo, the nucleic acid molecule or vehicle containing the nucleic acid molecule can be targeted to a cell.

[0648] Administration also can be direct, such as by administration of a vector or cells that typically targets a cell or tissue. For example, tumor cells and proliferating cells can be targeted cells for in vivo expression of u-PA polypeptides. Cells used for in vivo expression of a u-PA polypeptide also include cells autologous to the patient. Such cells can be removed from a patient, nucleic acids for expression of a u-PA polypeptide introduced, and then administered to a patient such as by injection or engraftment.

[0649] Administration for Treatment of AMD and Other Ocular Diseases

[0650] Nucleic acids encoding the modified u-PA polypeptides provides can be administered for treatment of diseases or conditions involving complement activation in their etiology, in which inhibition thereof can ameliorate a symptom of the disease or condition or otherwise treat the disease or condition. Nucleic acids, such as vectors, such as viral vectors, designed for delivery of nucleic acids that encode the modified u-PA polypeptides described herein can be administered to subjects by any suitable route or a combination of different routes, depending upon the disease or condition. Nucleic acid delivery can be effected via direct delivery to the eye (such as via ocular delivery, subretinal injection, intravitreal (IVT) injection, intraretinal injection, or topical (e.g., eye drops) delivery), or delivery via systemic routes, e.g., intraarterial, intraocular, intravenous, intramuscular, subcutaneous, intradermal, and other parental routes of administration.

[0651] One skilled in the art can select any mode of administration compatible with the subject and virus for administration, and that also is likely to result in the virus reaching and entering the target cell-type or tissue, e.g., eye, such as retinal pigment epithelial (RPE) cells and/or photoreceptor cells. The route of administration can be selected by one skilled in the art according to any of a variety of factors, including the nature of the disease, the properties of the target cell or tissue (e.g., cell type), and the particular virus to be administered. Administration can be selected where cells or tissue of interest are targeted, such as the eye, e.g., the retinal pigment epithelial (RPE) cells and/or photoreceptor cells or the subretinal space.

[0652] Nucleic acid encoding the modified u-PA polypeptides, such as viral expression vectors, can be delivered, for example, to the target cell which is characterized by the disease, such as an ocular disease, such as AMD. For example, the composition containing the virus can be delivered by subretinal injection, such as subretinal injection to the retinal pigment epithelium (RPE), photoreceptor cells or other ocular cells (e.g., retinal ganglion cells). In some examples, subretinal administration of a virus, such as any virus containing the nucleic acids described herein, requires the skilled physician to perform a vitrectomy (i.e., where a needle hole is created in the retina (retinomy) and fluid is injected, such as fluid containing a virus, such as any virus described herein). Subretinal injections can be effected via a transcomeal route, through the pupil and then passing through the lens, vitreous and retina. In other examples, subretinal injection can be performed by passing a needle or any other administration device through the sclera, entering the pars plana or limbus area, though the mid- or posterior vitreous and to the opposite side of the retina, into the subretinal space. In other examples, subretinal injection can be performed by passing a needle or any other administration device through the sclera and through the choroid and Bruch's membrane, avoiding the retina to achieve delivery to the RPE. Other appropriate routes for subretinal administration can be determined by the skilled artisan or physician or surgeon. In some examples, bleb formation signals successful administration.

[0653] In other examples, the composition containing nucleic acid encoding the modified u-PA polypeptide for expression in the eye can be delivered by intravitreal injection to ocular cells, such as administration to target vitreal cells and cells in the inner retina. In some examples, intravitreal injection is performed by passing a needle or any other administration device through the pars plana, though the mid- or posterior vitreous and to the opposite side of the retina. After intravitreal injection, the composition containing the virus can be delivered to infect ganglion cells. In other examples, the composition containing the virus delivered by intravitreal injection target inner nuclear layer cells. Efficacy of delivery depends on virus titer and serotype. In some examples, treatment comprises direct intravitreal injection combined with an intravitreal implantable device (i.e., bioerodible and nonbioerodible intravitreal implantable devices) to increase concentration of the administered agent to the back of the eye (Hwang et al. (2012) J Korean Med Sci 27:1580-85).

[0654] In other examples, the composition containing the nucleic acid encoding the modified u-PA polypeptide is injected via the palpebral vein to target ocular cells. In other examples, the virus is applied ex vivo (e.g., applied to excised RPE choroid or fetal retinal cells or retinal cells) for transplantation into the eye, such as, for example, as a retinal graft. In other examples, one of skill in the art, such as the skilled physician can select the appropriate route for administration of any virus containing the nucleic acids described herein. If desired, routes of administration can be combined.

[0655] In one example, the virus is administered locally, at the site where the target cells, e.g., diseased cells, are present, i.e., in the eye or the retina. Topical administration often is used in eye diseases of the anterior segment of the eye (Patel et al. (2013) World J Pharmacol 2:47-64).

[0656] In one example, a virus to be delivered intravitreally can be administered with a thin needle (27 to 30 G) through the pars plana inside the vitreous body. The skilled artisan will determine how far the needle shaft is inserted into the eye (e.g., insertion depth), the speed of administration (e.g., the pressure applied to the plunger), the angle of orientation of the bevel, and the angle between the shaft and the pars plana.

### H. THERAPEUTIC USES AND METHODS OF TREATMENT

[0657] The modified u-PA polypeptides provided herein target complement protein C3 and permit modulation of complement-mediated diseases and disorders. Therapeutic proteases, such as the modified u-PA polypeptides provided herein, have many potential advantages over traditional therapeutic approaches. Chief among them is the ability to inactivate disease targets in a catalytic manner (i.e. a one to many stoichiometry). Thus, proteases can maintain effective regulation at concentrations significantly below the target concentration. Additional differentiating advantages include (1) irreversible inactivation; (2) low dosing; (3) decreased dosing frequency (4) small molecular size; (5) the ability to target post-translational modifications; (6) the ability to neutralize high target concentrations; and (7) the ability to target away from the active site. As a therapeutic, a protease must still exhibit the following characteristics: (1) access to the molecular target (extracellular), and (2) possess sufficiently stringent specificity for a target critical to a disease state. The modified u-PA polypeptides provided herein can be used in the treatment of complement-mediated diseases and disorders.

[0658] The skilled artisan understands the role of the complement system in disease processes and is aware of a variety of such diseases. Provided is a brief discussion of exemplary diseases and the role of the complement protein C3 in their etiology and pathology. The modified u-PA polypeptides and nucleic acid molecules provided herein can be used for treatment of any condition for which activation of the complement pathway is implicated, particularly inflammatory conditions including acute inflammatory conditions, such as septic shock, and chronic inflammatory conditions, such as Rheumatoid Arthritis (RA). Acute and inflammatory conditions can be manifested as an immune-mediated disease such as, for example, autoimmune disease or tissue injury caused by immune-complex-mediated inflammation. A complement-mediated inflammatory condition also can be manifested as a neurodegenerative or cardiovascular disease that have inflammatory components. This section provides exemplary uses of, and administration methods for, modified u-PA polypeptides provided herein. These described therapies are exemplary and do not limit the applications of the modified u-PA polypeptides provided herein. Such methods include, but are not limited to, methods of treatment of physiological and medical conditions described and listed below. Such methods include, but are not limited to, methods of treatment of age-related macular degeneration (AMD), geographic atrophy (GA), paroxysmal nocturnal hemoglobinuria (PNH), renal delayed graft function (DGF), sepsis, Rheumatoid arthritis (RA), membranoproliferative glomerulonephritis (MPGN), lupus erythematosus, Multiple Sclerosis (MS), Myasthenia gravis (MG), asthma, inflammatory bowel disease, respiratory distress syndrome, immune complex (IC)-mediated acute inflammatory tissue injury, multi-organ failure, Alzheimer's Disease (AD), Ischemia-reperfusion injuries caused by events or treatments such as myocardial infarct (MI), stroke, cardiopulmonary bypass (CPB) or coronary artery bypass graft, angioplasty, or hemodialysis, chronic obstructive pulmonary disease (COPD), idiopathic pulmonary fibrosis (IPF) and/or Guillain Barre syndrome.

[0659] Treatment of diseases and conditions with modified u-PA polypeptides provided herein can be effected by any suitable route of administration using suitable formulations as described herein including, but not limited to, subcutaneous injection, oral, intravitreal, intraretinal, subretinal, periocular and transdermal administration. If necessary, a particular dosage and duration and treatment protocol can be empirically determined or extrapolated. For example, exemplary doses of wild type u-PA polypeptides can be used as a starting point to determine appropriate dosages. Modified u-PA polypeptides that have more specificity and/or selectivity compared to a wild type u-PA polypeptide can be effective at reduced dosage amounts and or frequencies. Dosage levels can be determined based on a variety of factors, such as body weight of the individual, general health, age, the activity of the specific compound employed, sex, diet, time of administration, rate of excretion, drug combination, the severity and course of the disease, and the patient's disposition to the disease and the judgment of the treating physician. The amount of active ingredient that can be combined with the carrier materials to produce a single dosage form will vary depending upon the host treated and the particular mode of administration.

[0660] Upon improvement of a patient's condition, a maintenance dose of a compound or compositions can be administered, if necessary; and the dosage, the dosage form, or frequency of administration, or a combination thereof can be modified. In some cases, a subject can require intermittent treatment on a long-term basis upon any recurrence of disease symptoms.

[0661] 1. Disease Mediated by Complement Activation

[0662] The complement cascade is a dual-edged sword, causing protection against bacterial and viral invasion by promoting phagocytosis and inflammation. Conversely, even when complement is functioning normally, it can contribute to the development of disease by promoting local inflammation and damage to tissues. Thus, pathological effects are mediated by the same mediators that are responsible for the protective roles of complement. For example, the anaphylactic and chemotactic peptide C5a drives inflammation by recruiting and activating neutrophils, C3a can cause pathological activation of other phagocytes, and the membrane attack complex can kill or injure cells. In one example, such as in many autoimmune diseases, complement produces tissue damage because it is activated under inappropriate circumstances such as by antibody to host tissues. In other situations, complement can be activated normally, such as by septicemia, but still contributes to disease progression, such as in respiratory distress syndrome. Pathologically, complement can cause substantial damage to blood vessels (vasculitis), kidney basement membrane and attached endothelial and epithelial cells (nephritis), joint synovium (arthritis), and erythrocytes (hemolysis) if it is not adequately controlled.

[0663] Complement has a role in immuno-pathogenesis of a number of disorders, including autoimmune diseases such as rheumatoid arthritis (see, e.g., Wang et al. (1995) Proc. Natl. Acad. Sci. U.S.A. 92:8955-8959; Moxley et al. (1987) Arthritis & Rheumatism 30:1097-1104), lupus erythematosus (Wang et al. (1996) Proc. Natl. Acad. Sci. U.S.A. 90:8563-8568; and Buyon et al. (1992) Arthritis Rheum. 35:1028-1037) and acute glomerulonephritis (Couser et al. (1995) J Am Soc Nephrol. 5:1888-1894). Other pathologies that involve activation of the complement system include sepsis (see, e.g., Stove et al. (1996) Clin Diag Lab Immunol 3:175-183; Hack et al. (1989) Am. J. Med. 86:20-26), respiratory distress syndrome (see, e.g., Zilow et al. (1990) Clin. Exp. Immunol. 79:151-157; and Stevens et al. (1986) J. Clin. Invest. 77:1812-1816), multiorgan failure (see, e.g., Hecke et al. (1997) Shock 7:74; and Heideman et al. (1984) J. Trauma 24:1038-1043), ischemia-reperfusion injury such as occurs in cardiovascular disease such as stroke or myocardial infarct (Austen W G et al. (2003) Int J Immunopathol Pharm 16(1):1-8), age-related macular degeneration (Bradley et al. Eye 25: 683-693 (2011); Gemenetzi et al. Eye 30: 1-14 (2016)) and renal delayed graft function (Danobeitia et al. [abstract]. Am J Transplant. 2013; 13 (suppl 5); Yu et al. (2016) Am J Transplant 16(9):2589-2597; Castallano et al. (2010) Am J Pathol 176(4): 1648-1659). Some exemplary examples of complement-mediated diseases are described below.

[0664] a. Rheumatoid Arthritis

[0665] Rheumatoid arthritis (RA) is a chronic inflammatory illness. It is an autoimmune disease in which the immune system attacks normal tissue components as if they were invading pathogens. The inflammation associated with rheumatoid arthritis primarily attacks the linings of the joints. The membranes lining the blood vessels, heart, and lungs also can become inflamed. RA is characterized by activated B cells and plasma cells that are present in inflamed synovium, and in established disease lymphoid follicles and germinal centers. This results in high levels of local immunoglobulin production and the deposition of immune complexes, which can include IgG and IgM rheumatoid factors, in the synovium and in association with articular cartilage which can serve as initiators of the complement cascade. Elevated levels of complement components, such as C3a, C5a, and C5b-9 have been found within the inflamed rheumatoid joints. These complement components can exacerbate the inflammation associated with RA by inducing a variety of proinflammatory activities such as, for example, alterations in vascular permeability, leukocyte chemotaxis, and the activation and lysis of multiple cell types.

[0666] b. Sepsis

[0667] Sepsis is a disease caused by a serious infection, such as a bacterial infection, leading to a systemic inflammatory response. The bacterial cell wall component, lipopolysaccharide, is often associated with sepsis, although other bacterial, viral, and fungal infections can stimulate septic symptoms. Septic shock often results if the natural immune system of the body is unable to defend against an invading microorganism such that, for example, the pro-inflammatory consequences of the immune response is damaging to host tissues. The early stages of sepsis are characterized by excessive complement activation resulting in increased production of complement anaphylatoxins, such as C3a, C4a, and C5a which act to increase vascular permeability, stimulate superoxide production from neutrophils and stimulate histamine release. The actions of C5a can contribute to a productive immune response to a bacterial infection, but if left unregulated, C5a also can be severely damaging. In an E. coli-induced model of inflammation, blockade of C5a improved the outcome of septic animals by limiting C5a-mediated neutrophil activation that can lead to neutrophil-mediated tissue injury.

[0668] The continued impairment of the innate immune response to a bacterial infection often leads to chronic sepsis or septic shock, which can be life-threatening. In the late stage of sepsis, it is the “dormant” activity of neutrophils, as opposed to the hyperactivity that occurs in the early phases, that contributes to continued disease. In the late stage, the major functions of neutrophils including chemotaxis, respiratory burst activity, and ability for bacterial killing are reduced. Complement, and in particular C5a, also plays a role in the later stages of sepsis. Excessive production of C5a during sepsis is associated with the “deactivation” of blood neutrophils, a process that has been linked to C5a-induced downregulation of its own receptor, C5aR, on neutrophils (Guo et al. (2003) FASEB J 13:1889). The reduced levels of C5aR on neutrophils correlates with a diminished ability of blood neutrophils to bind C5a, impaired chemotactic responses, a loss of superoxide productions, and impaired bactericidal activity. C5aR levels, however, can begin to “recover” at later stages of sepsis and correlate with instances of beneficial disease outcome.

[0669] c. Multiple Sclerosis

[0670] Multiple sclerosis (MS) and its animal model experimental allergic encephalomyelitis (EAE) are inflammatory demyelinating diseases of the central nervous system (CNS). In MS, inflammation of nervous tissue causes the loss of myelin, a fatty material which acts as a sort of protective insulation for the nerve fibers in the brain and spinal cord. This demyelination leaves multiple areas of scar tissue (sclerosis) along the covering of the nerve cells, which disrupts the ability of the nerves to conduct electrical impulses to and from the brain, producing the various symptoms of MS. MS is mediated by activated lymphocytes, macrophages/microglia and the complement system. Complement activation can contribute to the pathogenesis of these diseases through its dual role: the ability of activated terminal complex C5b-9 to promote demyelination and the capacity of sublytic C5b-9 to protect oligodendrocytes (OLG) from apoptosis.

[0671] d. Alzheimer's Disease

[0672] Alzheimer's disease (AD) is characterized by tangles (abnormal paired helical filaments of the protein tau, which normally binds to microtubules) and plaques (extracellular deposits composed primarily of beta-amyloid protein) within the brain. Although the precise cause of AD is not entirely clear, chronic neuroinflammation in affected regions of AD brains suggests that proinflammatory mediators can play a role. The tangles and plaques within an AD brain are deposited with activated complement fragments, such as, for example, C4d and C3d. Likewise, dystrophic neurites in an AD brain can be immunostained for MAC, indicating autocatalytic attack of these neurites and concomitant neurite loss in AD. Activation of complement in AD occurs by an antibody-independent mechanism induced by aggregated amyloid-beta protein. Further, the complement cascade can be activated by the pentraxins, C-reactive protein (CRP), and amyloid P (AP) which are all upregulated in AD (McGeer et al., (2002) Trends Mol Med 8:519). The activation of complement in AD, marked by increases in complement mediators, is not adequately controlled by a compensatory upregulation of complement regulatory proteins such as, for example, CD59. Thus, the proinflammatory consequences of complement activation exacerbates AD progression and likely contributes to neurite destruction.

[0673] e. Ischemia-Reperfusion Injury

[0674] Ischemia-reperfusion injury is the injury sustained after an ischemic event and subsequent restoration of blood flow and results from the inflammatory response to a hypoxic insult. Ischemia-reperfusion damage can be acute as during cardiac surgery procedures, such as, for example, following open heart surgery or angioplasty, or chronic as with congestive heart failure or occlusive cardiovascular disease. Examples of injuries that can cause ischemia-reperfusion injury include myocardial infarct (MI) and stroke. The initiation of an inflammatory response is likely caused by the increase in tissue oxygen levels that occur with reperfusion and the concomitant accumulation of metabolites that can generate oxygen free radicals which are immunostimulatory. Ischemia-reperfusion injury is associated with a variety of events including severity of myocardial infarction, cerebral ischemic events, intestinal ischemia, and many aspects of vascular surgery, cardiac surgery, trauma, and transplantation. The injury is manifested by inflammatory events of the innate immune system, particularly activation of the complement system, in response to newly altered tissue as non-self. As such ischemia-reperfusion injury is characterized by tissue edema caused by increased vascular permeability, and an acute inflammatory cell infiltrate caused by influx of polymorphonuclear leukocytes.

[0675] Activation of the complement system plays a role in the inflammatory events of ischemia-reperfusion injury. The ischemia injury results in alterations of the cell membrane, affecting lipids, carbohydrates, or proteins of the external surface such that these exposed epitopes are altered and can act as neo-antigens (modified self antigens). Circulating IgM recognize and bind the neo-antigens to form immune complexes on the injured cell surface. The antigen-antibody complexes formed are classic activators of the classical pathway of complement, although all pathways are likely involved in some way to the exacerbating effects of the injury. The involvement of the classical pathway of complement to ischemia-reperfusion injury is evidenced by mice genetically deficient in either C3 or C4 that display equal protection from local injury in a hindlimb and animal model of injury (Austen et al. (2003) Int J Immunopath Pharm 16:1). Conversely, in a kidney model of ischemia injury, C3-, C5-, and C6-deficient mice were protected whereas C4-deficient mice were not, suggesting the importance of the alternative complement pathway (Guo et al. (2005) Ann Rev Immunol 23:821). Mediators induced upon complement activation initiate an inflammatory response directed at the cell membrane at the site of local injury.

[0676] A major effector mechanism of complement in ischemia-reperfusion injury is the influx and activation of neutrophils to the inflamed tissue by complement components, such as for example C5a. Activation of neutrophils results in increased production of reactive oxygen species and the release of lysosomal enzymes in local injured organs which ultimately results in apoptosis, necrosis, and a loss or organ function. The generation of the terminal MAC, C5b-9, also contributes to local tissue injury in ischemia-reperfusion injury.

[0677] f. Ocular Disorders

[0678] In the normal eye, the complement system is continuously activated at low levels; membrane-bound and soluble intraocular complement regulatory proteins tightly regulate this spontaneous complement activation. Low level complement activation protects against pathogens without causing any damage to self-tissue and vision loss. The complement system and complement regulatory proteins control the intraocular inflammation in autoimmune uveitis and play an important role in the development of corneal inflammation, age-related macular degeneration and diabetic retinopathy. The complement system plays an important role in the pathogenesis of diabetic retinopathy (see, e.g., Ghosh et al. (2015) Endocr Rev 36:272-288) as well as diabetic neuropathy and diabetic cardiovascular disease. Spontaneous complement activation can cause damage to the corneal tissue after the infection. Complement inhibition is a relevant therapeutic target in the treatment of various ocular diseases (see, e.g., Purushottam et al. (2007) Mol Immunol. 44:3901-3908).

[0679] Age-Related Macular Degeneration (AMD)

[0680] Age-related macular degeneration is a clinical term that describes a variety of diseases that are characterized by the progressive loss of central vision. AMD is the leading cause of vision loss in aged individuals in many industrialized countries (Jager et al. (2008) N Engl J Med 358:2606-2617). Vision loss occurs due to the progressive degeneration of the macula, the region at the back of the eye comprising a high density of cone photoreceptors, which is specialized for high-acuity, central vision.

[0681] AMD can manifest as Dry (non-neovascular) AMD and/or Wet AMD. Dry AMD is the more common (85-90% of cases) and milder form of AMD, and is characterized by small, round, white-yellow lesions (drusen) in and under the macula. Advanced dry AMD, or geographic atrophy, leads to thinning of the retina due to loss of PRE photoreceptors, deterioration of the macula and eventual blindness. Although rarer, vision loss associated with wet AMD is generally more dramatic than in dry AMD. Wet AMD includes the formation of pathogenic blood vessels, termed choroidal neovascularization (CNV), in which abnormal blood vessels develop beneath the retinal pigment epithelium (RPE) layer of the retina. CNV invasion of the retina from the underlying choroid through fractures in Bruch membrane, the extracellular matrix between the choroid and the retinal pigment epithelium (RPE), or their breakage can cause vision loss in AMD (e.g., due to subretinal hemorrhage and/or scarring).

[0682] Early clinical hallmarks of AMD include thickening of the Bruch membrane and the appearance of drusen (Gass, J. D. (1972) Trans. Am. Ophthalmol. Soc. 70: 409-36), which are extracellular lipoproteinaceous deposits consisting of aggregated proteins (i.e., albumin, apolipoprotein E (APOE)), components of the complement pathway (e.g., complement factor H (CFH), C1q, C3, C5, C5b, C6, C7, C8, C9, and vitronectin (Hageman et al., (2001) Prog. Retin. Eye. Res 29:95-112; Hageman et al. (2005) Proc. Nat. Acad. Sci. 102: 7227-7232; Mullins et al. (2000) FASEB H 14:835-846; Anderson et al., (2010) Pro. Retin. Eye Res. 29:95-112)), immunoglobulins and/or amyloid-β (Crabb et al., (2002) Proc Natl Acad Sci 99: 14682-14687; Johnson et al., (2002) 99: 11830-11835)) and lipids and cellular components that are localized between the RPE and the Bruch membrane.

[0683] Inflammation in AMD is mediated by the deregulation of the alternative complement pathway. Complement components C3 and C5 are principal constituents of drusen in patients with AMD (Mullins et al., (2000) FASEB J 14, 835-46; Johnson et al., (2000) Exp Eye Res 70, 441-9; Anderson et al., (2002) Am J Ophthalmol 134, 411-31; and Leitner et al., (2001) Exp Eye Res 73, 887-96). It is hypothesized that drusen biogenesis involves chronic inflammatory processes that either can trigger complement activation and formation of MAC, which may lyse RPE cells or disturb physiological homeostasis in RPE cells, leading to inflammation characteristic of AMD (Johnson et al. (2001) Exp Eye Res 73, 887-896). Complement proteins (e.g., C3d) were also detected in blood in AMD patients (Scholl et al., (2008) PLoS One 3: e2593), indicating that AMD-induced inflammation may be systemic. There is genetic evidence for a role in complement in the pathogenesis of dry AMD (Klein et al. Science 308(5720):385-389 (2005); Yates et al., NEJM 357:553-561 (2007)), compstatin (and compstatin derivatives APL-1 and APL-2) and POT-4 (Potentia Pharmaceuticals), small peptide inhibitors of C3, may slow the progression of geographic atrophy (Ricklin et al. (2008) Adv. Exp. Med. Biol. 632: 273-292) in AMD, indicating that C3 (i.e., C3 inhibition) may be a viable target for AMD treatment.

[0684] g. Organ Transplantation and Delayed Graft Function (DGF)

[0685] Complement plays a role in the pathogenesis of ischemia-reperfusion injury. The mechanism of renal reperfusion injury depends on the generation of C5a and C5b-9, both of which have direct toxicity on the renal tubules contributing to acute tubular necrosis and apoptosis, and leading to post-ischemic acute renal failure and tissue fibrosis. In turn, the generation of these terminal pathway components depends on intra-renal synthesis of C3 and availability of other complement components that are essential for complement activation. The level of expression of C3 in the donor organ is strongly dependent on the cold ischemic time (Elham et al. (2010) Curr Opin Organ Transplant. 15:486-491).

[0686] Rejection in solid organ transplantation is influenced by the initial inflammatory response and subsequent adaptive alloimmune response, both of which are affected by various complement components. Complement proteins play a significant part in organ damage following transplantation in the process of ischemia reperfusion and in modulating the activation of the adaptive immune response. Inhibiting complement or modulating the function of complement protein molecules can reduce transplant organ damage and increase the organ lifespan (see, e.g., Elham et al. (2010) Curr Opin Organ Transplant. 15:486-491). Targeting complement components for therapeutic intervention can reduce organ damage at the time of organ recovery, transfer and after transplantation. Exemplary of such organs is the kidney. The modified u-PA polypeptides provided herein can be administered to mitigate and/or treat organ damage following transplantation.

[0687] Delayed graft function (DGF), such as renal delayed graft function, is a condition occurring in a subset of kidney transplant patients in which the transplanted organ fails to function normally immediately following transplant. Other possible transplants include, but are not limited to, heart, lung, vascular tissue, eye, cornea, lens, skin, bone marrow, muscle, connective tissue, gastrointestinal tissue, nervous tissue, bone, stem cells, islets, cartilage, hepatocytes, and hematopoietic cells. Renal DGF is characterized by acute necrosis of the renal allograft and is clinically defined by the need for dialysis shortly following transplantation. Acute kidney injury during the transplant process frequently manifests as DGF. The pathology underlying DGF is complex with contributions from donor-derived factors such as donor age and duration of ischemia, and recipient factors such as reperfusion injury, immunological responses and treatment with immunosuppressant medications.

[0688] Components of the complement cascade and complement activation play a critical role as mediators of transplant rejection and ischemia-reperfusion injury leading to DGF. Animal studies have established a key role for complement in ischemic reperfusion injury. For example, Eculizumab, a humanized monoclonal antibody directed against C5, blocks complement activation and was shown to prevent delayed graft function in a subset of high-risk kidney transplant patients (see, e.g., Horizon Scanning Research and Intelligence Centre brief, 2016 September; Johnson et al. (2015) Curr Opin Organ Transplant 20(6):643-651; Yu et al. (2016) Am J Transplant 16(9):2589-2597). Granular C4d deposition was associated with DGF in human renal allograft recipients (Kikid et al. (2014) Transpl Int 27(3):312-321). Increased C3 production is associated with kidney transplant rejection (Pratt et al. (2002) Nat Med 8(6):582-587; Damman et al. (2011) Nephrol Dial Transplant 26(7):2345-2354). Hence, the modified u-PA polypeptides provided herein, can be used as a therapeutic for preventing or ameliorating or eliminating transplant rejection and DGF.

[0689] 2. Therapeutic Uses

[0690] a. Immune-Mediated Inflammatory Diseases

[0691] Modified u-PA polypeptides described herein can be used to treat inflammatory diseases. Inflammatory diseases that can be treated with proteases include acute and chronic inflammatory diseases. Exemplary inflammatory diseases include central nervous system diseases (CNS), autoimmune diseases, airway hyper-responsiveness conditions such as in asthma, rheumatoid arthritis, inflammatory bowel disease, and immune complex (IC)-mediated acute inflammatory tissue injury.

[0692] Experimental autoimmune encephalomyelitis (EAE) can serve as a model for multiple sclerosis (MS) (Piddlesden et al., (1994) J Immunol 152:5477). EAE can be induced in a number of genetically susceptible species by immunization with myelin and myelin components such as myelin basic protein, proteolipid protein and myelin oligodendrocyte glycoprotein (MOG). For example, MOG-induced EAE recapitulates essential features of human MS including the chronic, relapsing clinical disease course the pathohistological triad of inflammation, reactive gliosis, and the formation of large confluent demyelinated plaques. Modified u-PA polypeptides can be assessed in EAE animal models. Modified u-PA polypeptides are administered, such as by daily intraperitoneal injection, and the course and progression of symptoms is monitored compared to control animals. The levels of inflammatory complement components that can exacerbate the disease also can be measured by assaying serum complement activity in a hemolytic assay and by assaying for the deposition of complement components, such as for example C1, C3 and C9.

[0693] Complement activation modulates inflammation in diseases such as rheumatoid arthritis (RA) (Wang et al., (1995) Proc. Natl. Acad. Sci. U.S.A. 92:8955). Modified u-PA polypeptides can be used to treat RA. For example, u-PA polypeptides can be injected locally or systemically. Modified u-PA polypeptides can be dosed daily or weekly. PEGylated u-PA polypeptides can be used to reduce immunogenicity. In one example, type II collagen-induced arthritis (CIA) can be induced in mice as a model of autoimmune inflammatory joint disease that is histologically similar to RA characterized by inflammatory synovitis, pannus formation, and erosion of cartilage and bone. To induce CIA, bovine type II collagen (B-CII) in the presence of complete Freund's adjuvant can be injected intradermally at the base of the tail. After 21 days, mice can be re-immunized using the identical protocol. To examine the effects of a u-PA polypeptide, 3 weeks following the initial challenge with B-CII, a u-PA polypeptide or control can be administered intraperitoneally twice weekly for 3 weeks. Mice can be sacrificed 7 weeks following the initial immunization for histologic analysis. To assess the therapeutic effect of a u-PA polypeptide on established disease, a u-PA polypeptide can be administered daily for a total of 10 days following the onset of clinical arthritis in one or more limbs. The degree of swelling in the initially affected joints can be monitored by measuring paw thickness using calipers. In both models, serum can be drawn from mice for hemolytic assays and measurement of complement markers of activation such as for example C5a and C5b-9. In another example, primate models are available for RA treatments. Response of tender and swollen joints can be monitored in subjects treated with u-PA polypeptides and controls to assess u-PA polypeptide treatment.

[0694] Modified u-PA polypeptide can be used to treat immune complex (IC)-mediated acute inflammatory tissue injury. IC-mediated injury is caused by a local inflammatory response against IC deposition in a tissue. The ensuing inflammatory response is characterized by edema, neutrophilia, hemorrhage, and finally tissue necrosis. IC-mediated tissue injury can be studied in an in vivo Arthus (RPA) reaction. Briefly, in the RPA reaction, an excess of antibody (such as for example rabbit IgG anti-chicken egg albumin) is injected into the skin of animals, such as for example rats or guinea pigs, that have previously been infused intravenously with the corresponding antigen (i. e. chicken egg albumin) (Szalai et al., (2000) J Immunol 164:463). Immediately before the initiation on an RPA reaction, a u-PA polypeptide, or a bolus control, can be administered at the same time as the corresponding antigen by an intravenous injection via the right femoral vein. Alternatively, a u-PA polypeptide can be administered during the initial hour of the RPA reaction, beginning immediately after injection of the antigen and just before dermal injection of the antibody. The effects of a u-PA polypeptide on the generation of complement-dependent IC-mediated tissue injury can be assessed at various times after initiation of RPA by collecting blood to determine the serum hemolytic activity, and by harvesting the infected area of the skin for quantitation of lesion size.

[0695] Therapeutic u-PA polypeptides, such as those described herein, can be used to treat sepsis and severe sepsis that can result in lethal shock. A model of complement-mediated lethal shock can be used to test the effects of a u-PA polypeptide as a therapeutic agent. In one such example, rats can be primed with a trace amount of lipopolysaccharide (LPS), followed by the administration of a monoclonal antibody against a membrane inhibitor of complement (anti-Crry) (Mizuno et al., (2002) Int Arch Allergy Immunol 127:55-62). A u-PA polypeptide or control can be administered at any time during the course of initiation of lethal shock such as before LPS priming, after LPS priming, or after anti-Crry administration and the rescue of rats from lethal shock can be assessed.

[0696] b. Neurodegenerative Disease

[0697] Complement activation exacerbates the progression of Alzheimer's disease (AD) and contributes to neurite loss in AD brains. Modified u-PA polypeptides described herein can be used to treat AD. Mouse models that mimic some of the neuropathological and behavioral features of AD can be used to assess the therapeutic effects of u-PA polypeptides. Examples of transgenic mouse models include introducing the human amyloid precursor protein (APP) or the presenilin 1 (PS1) protein with disease-producing mutations into mice under the control of an aggressive promoter. These mice develop characteristics of AD including increases in beta-amyloid plaques and dystrophic neurites. Double transgenic mice for APP and PS1 mutant proteins develop larger numbers of fibrillar beta-amyloid plaques and show activated glia and complement factors associated with the plaque. u-PA polypeptides can be administered, such as by daily intraperitoneal or intravenous injections, and the course and progression of symptoms is monitored compared to control animals.

[0698] c. Cardiovascular Disease

[0699] Modified u-PA polypeptides provided herein can be used to treat cardiovascular disease. u-PA polypeptides can be used in the treatment of cardiovascular diseases including ischemia reperfusion injury resulting from stroke, myocardial infarction, cardiopulmonary bypass, coronary artery bypass graft, angioplasty, or hemodialysis. u-PA polypeptides also can be used in the treatment of the inflammatory response associated with cardiopulmonary bypass that can contribute to tissue injury. Generally, a u-PA polypeptide can be administered prior to, concomitantly with, or subsequent to a treatment or event that induces a complement-mediated ischemia reperfusion injury. In one example, a u-PA polypeptide can be administered to a subject prior to the treatment of a subject by a complement-mediated, ischemic-injury inducing event, such as for example coronary artery bypass graft of angioplasty.

[0700] Effects of a u-PA polypeptide on treatment of ischemia reperfusion injury can be assessed in animal models of the injury. In one such model, myocardial ischemia is induced in rabbits that have had an incision made in their anterior pericardium by placing a 3-0 silk suture around the left anterior descending (LAD) coronary artery 5-8 mm from its origin and tightening the ligature so that the vessel becomes completely occluded (Buerke et al., (2001) J Immunol 167:5375). A u-PA polypeptide, such as for example a modified u-PA polypeptide, or a control vehicle such as saline, can be given intravenously in increasing doses as a bolus 55 minutes after the coronary occlusion (i.e. 5 minutes before reperfusion). Five minutes later (i.e. after a total of 60 minutes of ischemia) the LAD ligature can be untied and the ischemic myocardium can be reperfused for 3 hours. At the end of the reperfusion period, the ligature around the LAD is tightened. Effects of a u-PA polypeptide on ischemia injury can be analyzed by assessing effects on myocardial necrosis, plasma creatine kinase levels, and markers of neutrophil activation such as for example myeloperoxidase activity and superoxide radical release.

[0701] In another model of complement-mediated myocardial injury sustained upon perfusion of isolated mouse hearts with Krebs-Henseleit buffer containing 6% human plasma, treatment with modified u-PA polypeptides can be used to limit tissue damage to the heart. In such an example, the buffer used to perfuse the hearts can be supplemented with varying doses of modified u-PA polypeptides. The perfused hearts can be assayed for deposition of human C3 and C5b-9, coronary artery perfusion pressure, end-diastolic pressure, and heart rate.

[0702] Modified u-PA polypeptides provided herein can be used as therapeutics prior to or following Cardiopulmonary Bypass (CPB) or coronary artery bypass graft to inhibit the inflammatory immune response that often follows bypass and that can contribute to tissue injury. An in vitro recirculation of whole blood in an extracorporeal bypass circuit can be used to stimulate platelet and leukocyte changes and complement activation induced by CPB (Rinder et al. (1995) J. Clin. Invest. 96:1564). In such a model, addition of a u-PA polypeptide or control buffer, in varying doses, can be added to a transfer pack already containing blood from a healthy donor and porcine heparin, just prior to addition of the blood to the extracorporeal circuit. Blood samples can be drawn at 5, 15, 30, 45, 60, 75, and 90 minutes after recirculation and assayed for complement studies such as for example hemolytic assays and/or complement activation assays to measure for C5a, C3a, and/or sC5b-9. A pretreatment sample of blood drawn before its addition to the extracorporeal circuit can be used as a control. Flow cytometry of blood samples can be performed to determine levels of adhesion molecules on populations of circulating leukocytes (i.e. neutrophils) in the blood such as, for example, CD11b and P-selectin levels.

[0703] d. Age-Related Macular Degeneration (AMD)

[0704] Modified u-PA polypeptides described herein can be used to treat Age-Related Macular Degeneration (AMD). Age-Related Macular Degeneration (AMD) that can be treated with proteases include wet AMD, dry AMD and geographic atrophy.

[0705] Numerous animal models of AMD are available that mimic many of the characteristics of the human disorder (Pennesi et al. (2012) Mol. Aspects Med. 33(4):487-509)). Mutations in complement pathway genes were shown to increase or decrease susceptibility to AMD (Edwards et al. (2005) Science 308(5720):421-424; Hageman et al. (2005) Proc. Nat. Acad. Sci 102(20): 7227-7232; Klein et al. (2005) Science 308(5720):385-389). For example, in complement factor H (CFH), which normally interacts with C3b, the single nucleotide polymorphism Y402H prevented binding of C3b with factor B, leading to inhibition of C3 formation. Y402H is associated with an increased risk of AMD in people and the mutation was previously identified in 43-59% of AMD patients (Haines et al. (2005) Science 308(5720): 419-421; Thakkinstian et. al. (2006) Hum. Mol. Genet. 15(18): 2784-2790; Zareparsi et al. (2005) Am. J. Hum. Genet. 77(1): 149-153).

[0706] Genetically modified mice that lack the ability to make CFH develop characteristics of AMD, including retinal abnormalities, decreased visual acuity and complement deposition (Coffey et al. (2007) Proc. Nat. Acad. Sci. 104:16651-16656). Mutations in complement proteins Factor B (Montes et al. (2009) Proc. Nat. Acad. Sci. 106(11): 4366-4371), C2 (Gold et al. (2006) Nat. Genet. 38(4): 458-462), and C3 (Maller et al. (2007) Nat. Genet. 39(10): 1200-1201; Yates et al. (2007) New Engl. J. Med. 357(6): 553-561) are associated with increased or decreased risk of developing AMD based on their impact on expression and/or activity of the various complement proteins (Reynolds et al. (2009) Invest. Ophthalmol. Vis. Sci. 50(12): 5818-5827).

[0707] Modified u-PA proteases, such as modified u-PA proteases provided herein, where an activity, such as substrate specificity or selectivity, of the u-PA protease for cleaving complement protein C3 is altered can be can be used as therapeutics. The modified u-PA polypeptides provided herein are administered, for example, by bi-monthly intravitreal or subretinally, or intraretinal injection, and the course and progression of symptoms is monitored compared to control animals or subjects. The levels of complement components that can exacerbate the disease also can be measured by assaying serum complement activity in a hemolytic assay and by assaying for the deposition of complement components, such as, for example, C1, C3 and C9.

[0708] Complement activation plays a role in disease progress in Age-Related Macular Degeneration (AMD) (see, e.g., Bradley et al., (2011) Eye 25:683-693; Gemenetzi et al. (2016) 30:1-14). Modified u-PA polypeptides can be used to treat AMD. For example, u-PA polypeptides or a pharmaceutical composition containing u-PA polypeptides, such as the modified u-PA polypeptides described herein, can be injected intravitreally, or intraretinally, or subretinally, or periocularly. Modified u-PA polypeptides can be dosed daily or weekly or less frequently, such as for example, monthly or less frequently, such as bi-monthly. For AMD, modified uPA polypeptides that are not further “modified” for extended duration in the eye (e.g., fusion proteins, PEGylation, etc.) monthly dosing is likely (bi-monthly dosing also is contemplated). After appropriate “modification”, every 3 months (or less frequently) may be possible. The modified u-PA polypeptides can be modified, such as by PEGylation to reduce potential immunogenicity and/or to increase serum half-life. For AMD, modified u-PA polypeptides that are not further modified for extended duration in the eye (e.g., fusion proteins, PEGylation) monthly dosing or bi-monthly dosing is used. If modified, such as by PEGylation, dosing can be effected every 3 months or more.

[0709] e. Organ Transplant

[0710] Delayed Graft Function (DGF)

[0711] Modified u-PA polypeptides described herein can be used to treat Delayed Graft Function (DGF), including, such as, for example, DGF as a result of Ischemia-Reperfusion Injury in kidney transplant recipients. u-PA polypeptides also can be used in the treatment of the inflammatory response associated with organ transplant that can contribute to tissue injury. Generally, a u-PA polypeptide can be administered prior to, concomitantly with, or subsequent to a treatment or event that induces a complement-mediated ischemia reperfusion injury. In one example, a u-PA polypeptide can be administered to a subject prior to the treatment of a subject by a complement-mediated, ischemic-injury inducing event, such as for example kidney transplant or kidney allograft. Effects of a u-PA polypeptide on treatment of delayed graft function, for example delayed graft function as a result of ischemia-reperfusion injury, can be assessed in animal models of the injury, which mimic characteristics displayed in human kidney allografts or transplants.

[0712] The presence of early biomarkers of early graft dysfunction leading to DGF, including biomarkers for tubular epithelial cell injury, may indicate the need for therapeutics. Biomarkers of DGF (i.e., serum creatine) have been identified (Malyszko et al. (2015) Nature Scientific Reports 5:11684; Wanga et al. (2015) PLoS One 10(9):e0136276). Early detection of biomarkers for DGF and therapeutic intervention, such as, for example, therapeutic treatment with a modified u-PA polypeptide, may improve clinical outcomes.

[0713] Complement activation modulates disease progress in disorders such as delayed graft function after organ transplant, for example kidney transplant (Yu et al. (2016) Am J of Transplantation 16(9):2589-2597). Modified u-PA polypeptides can be used to treat DGF. For example, u-PA polypeptides can be administered for systemic delivery or can be injected directly into the graft or the surrounding tissues. Modified u-PA polypeptides can be administered prior to, during or after transplant. Modified u-PA polypeptides can be dosed daily or weekly or less frequently, such as, for example, monthly or less frequently, such as bi-monthly. In some instances a single systemic dose of the modified u-PA polypeptide is administered. Multiple infusions of the modified u-PA polypeptide over several hours are also considered.

[0714] Modified u-PA polypeptides can be delivered chronically, if needed, for example, the modified u-PA polypeptides, such as the modified u-PA polypeptides described herein, can be delivered on a daily basis or on another schedule to maintain an effective amount in the allograft recipient. Modified u-PA polypeptides can be used to prolong allograft survival in a recipient, in particular, chronic survival of the allograft. PEGylated u-PA polypeptides can be used to reduce immunogenicity.

[0715] 3. Combination Therapies

[0716] u-PA polypeptides provided herein can be used in combination with other existing drugs and therapeutic agents to treat diseases and conditions. Such treatments can be performed in conjunction with other anti-inflammatory drugs and/or therapeutic agents. Examples of anti-inflammatory drugs and agents useful for combination therapies include non-steroidal anti-inflammatory drugs (NSAIDs) including salicylates, such as aspirin, traditional NSAIDs such as ibuprofen, naproxen, ketroprofen, nabumetone, piroxicam, diclofenac, or indomethacin, and Cox-2 selective inhibitors such as celecoxib (sold under the trademark Celebrex®) or Rotecoxin (sold under the trademark Vioxx®). Other compounds useful in combination therapies include antimetabolites such as methotrexate and leflunomide, corticosteroids or other steroids such as cortisone, dexamethasone, or prednisone, analgesics such as acetaminophen, aminosalicylates such as mesalamine, and cytotoxic agents such as azathioprine (sold under the trademark Imuran®), cyclophosphamide (sold under the trademark Cytoxan®), and cyclosporine A. Additional agents that can be used in combination therapies include biological response modifiers. Biological response modifiers can include pro-inflammatory cytokine inhibitors including inhibitors of TNF-alpha such as etanercept (sold under the trademark Enbrel®), infliximab (sold under the trademark Remicade®), or adalimumad (sold under the trademark Humira®), and inhibitors of IL-1 such as anakinra (sold under the trademark Kineret®). Biological response modifiers also can include anti-inflammatory cytokines such as IL-10, B cell targeting agents such as anti-CD20 antibodies (sold under the trademark Rituximab®), compounds targeting T antigens, adhesion molecule blockers, chemokines receptor antagonists, kinase inhibitors such as inhibitors to mitogen-activated protein (MAP) Kinase, c-Jun N-terminal Kinase (JNK), or nuclear factor (NF) KB (NFκB), and peroxisome proliferator-activated receptor-gamma (PPAR-γ) ligands. Additional agents that can be used in combination therapies include immunosuppressants. Immunosuppressants can include tacrolimus or FK-506; mycophenolic acid; calcineurin inhibitors (CNIs); CsA; sirolimus or other agents known to suppress the immune system.

[0717] u-PA polypeptides provided herein also can be used in combination with agents that are administered to treat cardiovascular disease and/or administered during procedures to treat cardiovascular disease such as for example those described herein that contribute to inflammatory conditions associated with complement-mediated ischemia-reperfusion injury. For example, u-PA polypeptides provided can be administered in combination with anti-coagulants. Examples of exemplary anti-coagulants include, but are not limited to, heparin, warfarin, acenocoumarol, phenindione, EDTA, citrate, oxalate, and direct thrombin inhibitors such as argatroban, lepirudin, bivalirudin, and ximelagatran.

[0718] u-PA polypeptides provided herein also can be used in combination with agents that are administered to treat DGF. u-PA polypeptides provided herein can, for example, be administered in combination with an immunosuppressive agent. Such combination is useful in prolonging allograft survival in a recipient, in particular, chronic survival of the allograft. In preferred embodiments, the combination is formulated and prepared such that it is suitable for chronic administration to the recipient of the allograft, for example, stable formulations are employed. In certain embodiments, the combination is formulated and prepared such that it is suitable for concurrent administration of the modified u-PA polypeptides and the immunosuppressive drug to the recipient of the allograft. In certain embodiments, the combination is formulated and prepared such that it is suitable for sequential (in either order) administration of the modified u-PA polypeptides and the immunosuppressive drug to the recipient of the allograft.

[0719] u-PA polypeptides provided herein also can be used in combination with other agents that are administered to treat macular degeneration. For example, modified u-PA polypeptides can be administered with any one or more of ranibizumab (sold under the trade name Lucentis™); bevacizumab (sold under the trade name Avastin™); pegaptanib sodium (sold under the trade name Macugen™); aflibercept (sold under the trade name Eylea™); and verteporfin (sold under the trade name Visudyne™). U-PA polypeptides and fusion proteins provided herein also can be used in combination with an implantable telescope, laser treatment or laser photocoagulation, surgery, and/or photodynamic therapy, alone or in combination with the therapeutic verteporfin, to treat macular degeneration.

[0720] Additional agents, such as other complement inhibitors, can be used as anti-inflammatory drugs in combination therapy with modified u-PA polypeptides as described herein. Examples of such other complement inhibitors include cobra venom factor (CVF), polyanionic molecules such as heparin, dextran sulphate, polyvinyl sulphate, polylysine, or suramin, natural molecules such as K-76COOH, Rosmarinic acid, or extract of the Chinese medicinal herb Ephedra, synthetic molecules such as afamastat mesilate (FUT-175), a synthetic inhibitor of C1s (C1s-INH-248), or an inhibitor against C1 s and fD (BCX-1470), peptide inhibitors such as compstatin, antibody inhibitors of complement such as anti-C5 (N19-8), a humanized anti-C5 (h5G1.1), anti-C6, or anti-C8 antibodies, and soluble forms of membrane complement regulators such as soluble CR1 (sCRi), soluble DAF (sDAF), soluble MCP (sMCF), or soluble CD59 (sCD59) (Morgan et al., (2003) Mol Immunol. 40:159).

[0721] Pharmaceutical compositions containing u-PA polypeptides described herein can be used to treat any one or more inflammatory diseases or conditions mediated by complement activation. Also provided are combinations of u-PA polypeptides and another treatment or compound for treatment of an inflammatory disease or condition. The u-PA polypeptides and the anti-inflammatory agent can be packaged as separate compositions for administration together or sequentially or intermittently. Alternatively, they can provided as a single composition for administration or as two compositions for administration as a single composition. The combinations can be packaged as kits, optionally with additional reagents, instructions for use, vials and other containers, syringes and other items for use of the modified u-PA polypeptides.

### I. EXAMPLES

[0722] The following examples are included for illustrative purposes only and are not intended to limit the scope of the invention.

### Example 1

### Cloning and Expression of Modified u-PA Polypeptides and Screening for Modified u-PA Polypeptides that Cleave C3 at the QHAR/AS Site

[0723] A. Cloning of the u-PA

[0724] Nucleic acid encoding amino acids 179-431 with the C122S mutation by chymotrypsin numbering (set forth in SEQ ID NO:5) of the human u-PA polypeptide (Uniprot P00749; set forth in SEQ ID NO: 1) was cloned into the pE-SUMO-AMP expression vector C-terminal to the small ubiquitin-like modifier (SUMO) tag. The construct included the signal peptide (amino acids 1-20) and the protease domain (amino acids 179-431).

B. Generation of Modified u-PA Polypeptides

[0725] Modified u-PA polypeptides were generated by Quikchange site directed mutagenesis (Stratagene) according to the manufacturer's instructions with specifically designed oligonucleotides that served as primers to incorporate designed mutations into the newly synthesized DNA. A PCR reaction was set up containing the wild type u-PA DNA as a template and oligonucleotide primers designed to contain the desired mutation(s). Following PCR, each reaction product was digested with DpnI to remove dam methylated parental strands of DNA. The DNA then was transformed into E. coli XL-1 Blue Supercompetent cells (Stratagene) and plated on selective agar containing 50 μg/ml carbenicillin. Plasmid DNA was isolated from selected clones, and sequenced to verify incorporation of the intended mutation(s) at the selected location(s) within the u-PA encoding DNA and the absence of any additional, undesired mutations.

C. Preparation of u-PA Polypeptides

[0726] 1. Transformation

[0727] DNA encoding wild-type and each of the variant u-PA polypeptides was cloned into the pE-SUMO-AMP expression vector C-terminal to the small ubiquitin-like modifier (SUMO) tag and prodomain as detailed in Section A. above, and the resulting constructs were transformed into BL21 Gold (DE3) E. coli cells (Agilent Technologies, Catalog number: 230132). Approximately 50 μL of chemically competent BL21 Gold (DE3) cells were transformed with 0.5 μL of the appropriate plasmid DNA (typically containing 1 pg-50 ng of total DNA). Cells and DNA were incubated on ice for 30 minutes, cells were then heat shocked at 42° C. for 45 sec and further incubated on ice for 2 minutes. 450 μL of room temperature Terrific Broth (TB) media (VWR International, Catalog number 100219-866) was added to the mixture, and cells were incubated in the TB media for 1 hour with shaking at 240 rpm at 37° C. 20 μL of this transformation mixture was spread on a 2× YT medium+100 μg/mL carbenicillin plate from Teknova (Cat #: Y4420) and incubated overnight at 37° C.

[0728] 2. Expression of u-PA Polypeptides

[0729] Cells containing DNA encoding a desired u-PA polypeptide (typically obtained from a single, “confirmed” colony from the transformation process described above) were grown in approximately 50 mL of medium prepared by combining 50 μL of Carbenicillin, 0.3 mL of 20% Lactose solution, 5 mL of phosphate buffer, and 45mls of base Terrific Broth (TB) media (Teknova, Catalog number L0350). The cells and growth medium were rotated at 400 rpm in an Infors Multitron Shaker at 37° C. After 18 to 22 hours of growth, bacteria were pelleted by centrifugation at 7,000 rpm in a 50 ml Falcon centrifuge tube in a Beckman Sorval RC6 Plus Centrifuge with Fiberlite F13-14×50cs centrifugation rotor (Thermo-Fisher) for 10 minutes at 4° C. After centrifugation, the supernatant was decanted.

[0730] The cell pellet from the 50 mL culture was resuspended in 10 ml of cell lysis buffer A (50 mM Tris, pH 8.0, 50 mM NaCl, 2 mM EDTA, 0.1 mg/mL Lysozyme). The cell pellet was resuspended in buffer A by shaking at 240 rpm for 1 hr at 37° C. The resulting mixture was subjected to centrifugation at 7,000 rpm for 15 minutes, and the supernatant was decanted. The resulting pellets were resuspended in 10 ml BugBuster® extraction reagent (Merck Millipore, NC9591474) containing 20 μL Benzonase™ (Millipore Sigma). Cells were resuspended by vortexing and shaking at 240 rpm for 1 hr at 37° C. Following shaking, the remaining insoluble material was pelleted by centrifugation at 10,000 rpm for 15 minutes at 4° C., and the supernatant was decanted. The resulting pellet was resuspended by homogenizing in 10 ml of Wash Buffer A [50 mM Tris (pH 8.0), 300 mM NaCl, and 1% Triton X-100] using a Power Gen 500 homogenizer (Fisher Scientific, 14-261-04P). This mixture, containing resuspended u-PA polypeptide inclusion bodies (IBs) was centrifuged at 10,000 rpm for 15 minutes at 4° C., and the supernatant was discarded. The new pellets were resuspended in 10 mL of Wash Buffer B (50 mM Tris (pH 8.0)) and homogenized repeatedly until the pellet was well dispersed. The resulting mixture was again centrifuged at 10,000 rpm for 15 minutes at 4° C., the supernatant was decanted, and the pellet was allowed to air dry for 10 to 15 minutes. This pellet of u-PA polypeptide inclusion bodies (IB) can be stored at −20° C. or used immediately for the unfolding and refolding described below.

[0731] 3. Unfolding of uPA

[0732] The insoluble SUMO-u-PA polypeptide fusion protein inclusion bodies were dissolved and denatured in 5 mL of unfolding buffer [6M GuHCl, 50 mM Tris pH 8, (Teknova, Catalog number: G0380)]. Freshly prepared DTT was added to a final concentration of 10 mM on the day of the re-folding procedure. This IB solution was agitated at 240 rpm at 37° C. for at least 1 hour (typically 2 hours), or until the inclusion bodies were fully dissolved. The fully-dissolved IB solution is clear but can exhibit a brownish tint.

[0733] 4. Refolding of u-PA

[0734] The 5 ml solution of unfolded u-PA polypeptide described above is split into two aliquots of 2.5 ml, and each aliquot is added to 200 ml of refolding buffer [1.5 M Arginine, 50 mM Tris pH 8.0, 150 mM NaCl, 5 mM GSH (L-Glutathione Reduced, Sigma-Aldrich), and 4.0 mM GSSG (L-Glutathione Oxidized, Sigma-Aldrich)]. This solution containing u-PA polypeptides in Refolding Buffer was incubated on a shaker at 150 rpm for 24 hours at room temperature to allow folding to take place.

[0735] The resulting protein solution was transferred to 12,000-14,000 Dalton molecular weight cutoff (MWCO) Spectra/Por® regenerated cellulose dialysis tubing (VWR) that was approximately 35 cm in length, and dialyzed in 25 mM Bis-Tris, pH 6.1. Samples were dialyzed at least overnight, and, more typically, for several days. Samples dialyzed for only one day were incubated at room temperature, and samples dialyzed for more than one day were incubated at 4° C. The optimal ratio of total dialysis buffer volume to total sample volume was at least 100. Lower ratios typically produced lower yields of properly folded u-PA polypeptide. Following dialysis, the protease samples were removed from the dialysis tubing and filtered using a 500 mL 0.22 m flask (Millipore).

[0736] 4. Column Purification of Zymogen

[0737] The protein solution was then purified using Sulfopropyl Sepharose Fast Flow (SPFF) system. The column was prepared by adding of 6 mL of SPFF Superflow slurry (GE Lifesciences) (with approximately 3 mL of resin) to each Econo Column (BioRad), and the storage solution was allowed to drain from the resin. 10 mL of 25 mM Bis-Tris pH 6.1, 1 M NaCl was then added to the column containing the resin, and the solution was allowed to flow through the column. Then, 10 mL of 25 mM Bis-Tris pH 6.1 was added to the column containing the resin, and the solution was allowed to pass through. The bottom of the column is capped and stored with the addition of 10 mL 25 mM Bis-Tris pH 6.1 buffer to equilibrate the resin.

[0738] The refolded and dialysed u-PA polypeptide sample solution was applied to the equilibrated SPFF column, followed by 10 ml of 25 mM Bis-Tris pH 6.1, 50 mM NaCl. The unactivated, u-PA polypeptide zymogen was then eluted with 4 ml of 25 mM Tris pH 7.5, 500 mM NaCl that was collected into a 50 mL Falcon tube. The sample was then diluted with 25 mM Tris pH 7.5 to a total volume of 12 ml.

[0739] 5. Activation of u-PA Zymogen

[0740] The 12 ml sample containing the purified u-PA polypeptide zymogen was diluted by addition of 12 ml of activation buffer (25 mM Tris pH 7.5, 20 mM Benzamidine). The u-PA polypeptide zymogen was then converted into the corresponding active u-PA protease with the SUMO Protease ubiquitin-like specific protease-1 (ULP-1) from Saccharomyces cerevisiae. “Activation” of the u-PA polypeptide zymogen was accomplished by adding 120 μg of ULP-1 to the purified zymogen, briefly swirling the solution and incubating the sample overnight at room temperature.

[0741] 6. Purification of Activated u-PA Polypeptides

[0742] Active u-PA polypeptides were purified using ion exchange chromatography. Prior to chromatography, the sample was filtered with a 50 ml filter unit. A Vivapure Q spin column was pre-conditioned with 5 ml of 25 mM Tris pH 7.5, 1M NaCl and 10 ml of 25 mM Tris pH 7.5 followed by centrifugation at 500g in a Sorvall Legend RT centrifuge for 5 minutes.

[0743] Each sample containing an activated u-PA polypeptide was loaded onto an individual Q-spin column in 19 mL batches and centrifuged at 500g for 5 minutes for each run. The flow-through containing activated u-PA without SUMO tag and Zymogen was collected. The pH of the resultant u-PA sample was adjusted by adding 12 ml of 25 mM Citric Acid, pH=5.0 and 60 μL of 1M Citric Acid. The resulting protein solution was then loaded onto a pre-conditioned Vivapure S spin column. This column was preconditioned with 5 ml of 25 mM Tris pH 7.5, 1M NaCl and 10 mL of 25 mM Tris pH 7.5, followed by centrifuging the column at 500 g for 5 mins. Samples were loaded onto the S-column (HiTrap SP HP; GE Healthcare) in 19 ml batches and the column was centrifuged at 500 g for 5 mins. The flow through from this process was discarded. The column is then “washed” with 10 ml of 25 mM Sodium Citrate pH 5.0, 20 mM NaCl. After washing the column, the collection tube is replaced with a new tube that contains 7 ml of the dilution buffer 50 mM Sodium Citrate pH 5.0. u-PA polypeptide is then eluted from the column with 7 ml of 25 mM Sodium Phosphate pH 7.0, 250 mM NaCl. The elute, containing a u-PA polypeptide, is then concentrated and “buffer-exchanged” into citrate buffered saline (CBS; 20 mM Sodium Citrate pH 5.0, 50 mM NaCl) using an Amicon Ultra-15 Centrifugal Filter Unit to achieve a final concentration of ≥60 μM (A280 of ≥2.6). Optical density of the solutions was measured using a Nanodrop device. The quality of the preparation was initially assessed by SDS-PAGE. Two g of u-PA polypeptide sample in 1× Sample Buffer containing Bond-Breaker TCEP was loaded on each “lane” of a 12-well 4-12% PAGE NovexBis-Tris gel, and run in 1×MES Running Buffer at 200 V for 40 min. Proteins were “visualized” by staining the gel with Comassie Blue followed by destaining. Fractions containing single bands migrating at approximately 25 kDa were snap-frozen in liquid nitrogen and stored at −80° C. until use. The quality of individual u-PA polypeptide samples were further assessed by activity assays and mass spectroscopy.

[0744] D. Selection and Identification of Modified u-PA Polypeptides that Cleave C3 to Inactivate it

[0745] Modified u-PA polypeptides were identified by screening a library of modified u-PA polypeptides against a modified serpin (PAI-1) as described, for example in detail in U.S. Pat. No. 8,211,428 (see, also published US application Publication No. US-2014-0242062-A1). An inhibitory serpin, or fragment thereof, capable of forming a covalent acyl enzyme intermediate between the serpin and protease is used for screening. Generally, the serpin used is one that in vivo normally targets the protease. In the assay a serpin modified by replacement of its reactive site loop (RSL) to include the target sequence (i.e. the active site in C3) captures modified proteases that will cleave the target site to form stable complexes. The captured modified protease is then isolated/identified. For u-PA, PAI-1, PAI-2, PAI-3, particularly PAI-1 which is an inhibitor thereof, are cognate serpins. The serpin PAI-1 was modified by replacing the residues indicated below with QHARASHLG (residues 737-745 of C3, SEQ ID NO: 47), which is the active site of human C3. All modified u-PA polypeptides were selected so that they cleave within the active site of C3. In particular they cleave between R and A.

Q H A R ↓ A S H L

[0746] ATIII “bait” (BELOW) with inserted sequence QHARASHLG (corresponding to an inactivating cleavage site in C3 (residues 737-745 of SEQ ID NO: 47)):

```
                10 20 30 40
CHHPPSYVAH LASDFGVRVF QQVAQASKDR NVVFSPYGVA
                50 60 70 80
SVLAMLQLTT GGETQQQIQA AMGFKIDDKG MAPALRHLYK
                90 100 110 120
ELMGPWNKDE ISTTDAIFVQ RDLKLVQGFM PHFFRLFRST
              130 140 150 160
VKQVDFSEVE RARFIINDWV KTHTKGMISH LLGTGAVDQL
              170 180 190 200
TRLVLVNALY FNGQWKTPFP DSSTHRRLFH KSDGSTVSVP
              210 220 230 240
MMAQTNKFNY TEFTTPDGHY YDILELPYHG DTLSMFIAAP
              250 260 270 280
YEKEVPLSAL TNILSAQLIS HWKGNMTRLP RLLVLPKFSL
              290 300 310 320
ETEVDLRKPL ENLGMTDMFR QFQADFTSLS DQEPLHVALA
              330 340 350 360
LQKVKIEVNE SGTVASSSTL RRQHARASHL EIIIDRPFLF
              370
VVRHNPTGTV LFMGQVMEP
```

[0747] The mutations in habove modified PAT-1 are as follows:

| | | | |
|---|---|---|---|
| RCL | LRRQHARASRL | 341 | 350 |
| Mutation | V1C | 1 | 1 |
| Mutation | N150H | 150 | 150 |
| Mutation | K154T | 154 | 154 |
| Mutation | Q319L | 319 | 319 |
| Mutation | A340L | 340 | 340 |
| Mutation | V341R | 341 | 341 |
| Mutation | I342R | 342 | 342 |
| Mutation | V343Q | 343 | 343 |
| Mutation | S344H | 344 | 344 |
| Mutation | M347A | 347 | 347 |
| Mutation | A348S | 348 | 348 |
| Mutation | P349H | 349 | 349 |
| Mutation | E350L | 350 | 350 |
| Mutation | M354I | 354 | 354 |

[0748] Table 14, in Example 2 below, sets forth mutations, and provides SEQ IDs for exemplary protease domains of modified u-PA polypeptides that contain the mutations. Numbering is chymotrypsin numbering. The modified u-PA polypeptides were generated and selected to inactivate C3, with the mutations indicated. While the SEQ ID NOs. reference protease domains, it is understood that the mutations can be included in precursor, full-length and mature modified u-PA polypeptides. The C122S replacement, or other conserved replacement for S, is included to reduce aggregation; while advantageous, it is optional. For modified u-PA for use for gene therapy or for PEGylation, the C122S replacement is not included in the modified u-PA or in the encoding nucleic acid. C122 can serve as a site for conjugate of a pegylation moiety or other modification. When expressed in vivo, aggregation generally is not a concern. Also for which the active form is a two chain form linked by a disulfide bond, the free Cys at residue 122 generally is not modified to Ser so that it is available to form the disulfide bond.

### Example 2

### In Vitro Cleavage of Complement Protein C3

[0749] The activity of the modified u-PA polypeptides for inactivation cleavage of C3 was determined by measuring the amount of intact human C3 remaining after incubation of the substrate complement protein human C3 with various concentrations of each modified protease for 1 hour at 37° C. In accord with this assay, signal is generated in the presence of intact human C3, and is lost as the C3 is cleaved.

[0750] 2 μM plasma purified human C3 (Complement Technologies; Tyler, Tex.) was incubated with the modified u-PA polypeptides (0-250 nM) for 1 hour at 37° C. in buffer containing 50 mM Tris, pH 8.0, 50 mM NaCl, and 0.01% Tween-20. The activity of the modified u-PA polypeptides was quenched by the addition of EGR-CMK (Haematologic Technologies, EGRCK-01) to a final concentration of 10 μM and the hC3/modified u-PA polypeptide mixture was allowed to stand for 30 minutes at ambient temperature.

[0751] Residual levels of undigested human C3 were quantified using an Amplified Luminescent Proximity Homogeneous Assay Screen (sold under the trademark AlphaScreen®; Perkin Elmer). a-mouse IgG-coated acceptor beads at 100 μg/mL (Perkin Elmer #6760606) were incubated with 5 nM mouse a-hC3a mAb (Abcam # ab11872-50) in 50 mM Tris, pH 8.0, 50 mM NaCl, 0.01% Tween-20 and 0.2% BSA to form the acceptor bead mixture. The acceptor bead mixture was shielded from light and placed on a rotating shaker for 30-60 minutes. The hC3/modified u-PA polypeptide reaction mixtures (prepared above) were diluted 1600-fold into 50 mM Tris, pH 8.0, 50 mM NaCl, 0.01% Tween-20, 0.2% BSA and 4 μL aliquots were placed in duplicate wells of a 384-well Optiplate (Perkin Elmer #6007299). 8 μL of a a-hC3 mAb/acceptor beads mixture was incubated with 8 μL of 25 nM biotinylated goat a-hC3 pAb (prepared using EZ-Link Sulfo-NHS-LC-Biotin kit from Thermo Scientific #21327 from the unbiotinylated version from Complement Technologies #A213). The plate was then shielded from light and incubated for 30 minutes at ambient temperature. After this time, 4 μL of 100 μg/mL streptavidin-coated donor beads (Perkin Elmer #6760606) were added to each well and incubated for 60 minutes, shielded from light. The alphascreen signal (Excitation=680 nm, Emission=570 nm) was then measured using an Envision 2104 Multilabel plate reader (Perkin Elmer). This signal (corresponding to the concentration of remaining hC3 ([hC3])) was plotted as a function of Alterase® concentration ([Alterase]) and the data were fitted to the four parameter equation below to determine the concentration of modified u-PA polypeptide (the Alterase® concentration) required to cleave through 50% of the available hC3 (EC₅₀), the Hill slope (Hill) as well as the maximum (Max) and minimum (Min) signals in the assay.

$$[ h C 3 ] = Min + \frac{Max - Min}{1 + {( \frac{[ Alterase ]}{E {C}_{50}} )}^{Hill}}$$

[0752] Cleavage of hC3 by the u-PA variant containing the mutations R35Q/H37Y/R37aE/V38E/T39Y/V41R/D60aP/Y60bQ/T97aI/L97bA/H99Q/C122S/Y149R (see, SEQ ID NO:21) was measured independently a total of 13 times, using 9 different lots of the protease. The average EC₅₀ value for this modified u-PA polypeptide was determined to be 19 nM (n=13, SD=2.2); in the experiment for which the results are reported in the Table 14 below, it was 24.5 nM.

[0753] About 600 modified u-PA polypeptides comprising a protease domain with the mutations set forth in Table 14. Results are set forth in Table 14 below. The majority of the tested modified u-PA polypeptides cleaved human complement protein C3 significantly more efficiently (i.e., lower ED₅₀) than the wild type u-PA protease domain containing the C122S replacement; many with an ED₅₀ below 100 nM. The polypeptides include the C122S replacement to prevent aggregation upon expression, for example, of the protease domain. In some embodiments, the modified u-PA polypeptide is full length that is activated to form a two chain activated polypeptide. For such embodiments, the modified u-PA protease domain does not include the C122S replacement (279 by mature numbering); the cysteine forms a disulfide bond (between 148C and 279C by mature numbering, with reference to SEQ ID NO:3)

[0754] Among the tested u-PA variants are those that were less potent than wild type u-PA, particularly those variants for which no cleavage (i.e., indicated as NA in Table 14 below) of hC3 was observed during the one hour assay. Other low activity variants cleaved less than 25% of the hC3 during the assay and were therefore not assigned an ED₅₀. Based on these results, the skilled person can select mutations that increase cleavage activity for C3.

TABLE 14

| SEQ ID | | ED50 |
|---|---|---|
| NO* | Mutation String | (nM) |
| 749 | R35Y/H37S/R37aP/V38E/T39Y/V41R/D60aP/Y60bD/T97aI/L97bA/H99Q/C122S/ | 0.92 |
| | Y151L | |
| 678 | R35W/R36Q/H37S/V38P/T39Y/V41R/Y60bN/T97aE/L97bA/H99Q/C122S/Y149R/ | 2.38 |
| | Y151L | |
| 277 | F30Y/R35Y/R36H/H37K/V38E/T39F/Y40F/V41R/K82R/T97aI/L97bA/H99Q/K110aR/ | 2.47 |
| | C122S/Y149R/M157K | |
| 280 | F30Y/R35Y/R36H/H37K/V38E/T39F/Y40F/V41R/T97aI/L97bA/H99Q/C122S/Y149R/ | 2.49 |
| | M157K/K179R | |
| 278 | F30Y/R35Y/R36H/H37K/V38E/T39F/Y40F/V41R/K92R/T97aI/L97bA/H99Q/C122S/ | 3.04 |
| | Y149R/M157K | |
| 614 | F30Y/R35V/R36H/H37G/V38E/T39W/Y40H/V41R/Y60bW/T97aI/L97bA/H99Q/ | 3.47 |
| | C122S/Y149E/M157K | |
| 279 | F30Y/R35Y/R36H/H37K/V38E/T39F/Y40F/V41R/K92S/T97aI/L97bA/H99Q/C122S/ | 3.48 |
| | Y149R/M157K | |
| 276 | F30Y/R35Y/R36H/H37K/V38E/T39F/Y40F/V41R/K61R/K62R/T97aI/L97bA/H99Q/ | 3.51 |
| | C122S/Y149R/M157K | |
| 281 | F30Y/R35Y/R36H/H37K/V38E/T39F/Y40F/V41R/T97aI/L97bA/H99Q/C122S/Y149R/ | 3.87 |
| | M157K/K179S | |
| 291 | R35W/H37P/R37aN/V38E/T39Y/V41R/D60aP/Y60bL/T97aI/L97bA/H99Q/C122S | 4.38 |
| 690 | F30Y/R35W/R36T/H37S/V38S/T39Y/Y40L/V41R/Y60bN/T97aE/L97bA/H99Q/C122S/ | 4.47 |
| | Y149R/Y151L/M157R/Q192Y | |
| 272 | F30Y/R35Y/R36H/H37K/V38E/T39F/Y40F/V41R/T97aI/L97bA/H99Q/C122S/M157K | 4.68 |
| 287 | F30Y/R35Y/R36H/H37K/V38E/T39F/Y40F/V41R/K61S/K62S/T97aI/L97bA/H99Q/ | 4.75 |
| | C122S/Y149R/M157K | |
| 751 | R35A/H37E/R37aG/V38E/T39Y/V41R/D60aP/Y60bD/T97aI/L97bA/H99Q/C122S/ | 4.76 |
| | Y151L | |
| 676 | R35W/R36Q/H37S/V38T/T39Y/Y40H/V41R/Y60bN/T97aE/L97bA/H99Q/C122S/ | 4.78 |
| | Y149R/Y151P/M157R | |
| 668 | F30Y/R35W/H37Y/V38E/T39Y/Y40H/V41R/Y60bN/T97aE/L97bA/H99Q/C122S/ | 4.92 |
| | Y149R | |
| 977 | V38E/T39W/V41R/D60aW/Y60bP/L97bG/H99L/C122S | 4.94 |
| 682 | R35W/R36K/H37S/V38E/T39Y/Y40L/V41R/Y60bN/T97aE/L97bA/H99Q/C122S/ | 5.01 |
| | Y149R/Y151L/M157S/Q192H | |
| 792 | R35Q/H37Y/R37aP/V38E/T39Y/V41R/D60aQ/Y60bP/T97aI/L97bA/H99Q/C122S/ | 5.14 |
| | Y149R | |
| 225 | I17V/F30Y/R35Q/R36H/H37W/V38E/Y40H/V41R/T97aI/L97bA/H99Q/C122S/M157K/ | 5.21 |
| | T158A | |
| 750 | R35Y/H37S/R37aP/V38E/T39Y/V41R/D60aP/Y60bD/T97aI/L97bA/H99Q/C122S/ | 5.26 |
| | Y151L/Q192H | |
| 10 | F30Y/R35W/R36H/H37D/V38E/T39Y/Y40F/V41R/T97aI/L97bA/H99Q/C122S/Y149R/ | 5.33 |
| | M157K | |
| 675 | R35W/R36N/H37S/V38E/T39Y/Y40M/V41R/Y60bN/T97aE/L97bA/H99Q/C122S/ | 5.52 |
| | Y149R/M157S | |
| 802 | R35Y/H37D/V38E/T39W/V41R/D60aP/Y60bE/T97aI/L97bA/H99Q/C122S/Y149R | 5.57 |
| 288 | F30Y/R35Y/R36H/H37K/V38E/T39F/Y40F/V41R/K82S/T97aI/L97bA/H99Q/K110aS/ | 5.82 |
| | C122S/Y149R/M157K | |
| 744 | R35W/H37P/R37aN/V38E/T39Y/V41R/D60aP/Y60bL/D97T/T97aE/L97bG/A98S/ | 6.17 |
| | H99L/C122S | |
| 275 | F30Y/R35Y/R36H/H37K/V38E/T39F/Y40F/V41R/T97aI/L97bA/H99Q/Y149R/M157K | 6.24 |
| 753 | R35Y/H37S/R37aP/V38E/T39Y/V41R/D60aP/Y60bD/T97aI/L97bA/H99Q/C122S | 6.24 |
| 669 | F30Y/R35W/H37S/V38E/T39Y/Y40H/V41R/Y60bN/T97aI/L97bA/H99Q/C122S/ | 6.35 |
| | Y149R/M157K | |
| 286 | F30Y/R35W/H37S/V38E/T39Y/Y40H/V41R/Y60bN/T97aE/L97bA/H99Q/C122S/ | 6.38 |
| | M157K | |
| 981 | R35H/V38E/T39Y/V41R/D60aP/Y60bQ/L97bA/H99Q/C122S/T158A | 7.23 |
| 656 | R35Q/R36H/H37Y/V38E/T39Y/Y40L/V41R/T97aI/L97bA/H99Q/C122S/Y149R/ | 7.33 |
| | M157K | |
| 705 | R35W/H37P/R37aG/V38E/T39Y/V41R/D60aP/Y60bE/T97aI/L97bA/H99Q/C122S/ | 7.4 |
| | Y149R | |
| 824 | V38D/V41Q/D60aH/Y60bS/T97aW/L97bR/H99E/C122S/Y151L/E175D/R217E/K224R | 7.48 |
| 731 | F30Y/R35W/R36H/H37P/R37aQ/V38E/T39Y/Y40F/V41R/Y60bQ/T97aE/L97bA/ | 7.52 |
| | H99Q/C122S/Y149R/M157K | |
| 677 | F30Y/R35W/R36Q/H37S/V38P/T39Y/Y40L/V41R/Y60bN/T97aE/L97bA/H99Q/C122S/ | 7.55 |
| | Y149R/M157R | |
| 679 | F30H/R35W/R36T/H37S/V38P/T39Y/V41R/Y60bN/T97aE/L97bA/H99Q/C122S/ | 7.59 |
| | Y149R/Y151L/M157S | |
| 613 | F30Y/R35W/R36H/H37D/V38E/T39Y/Y40H/V41R/Y60bD/T97aI/L97bA/H99Q/C122S/ | 7.64 |
| | M157K | |
| 707 | F30Y/R35Y/R36H/H37N/V38E/T39F/Y40F/V41R/K61E/R72H/T97aI/L97bA/H99Q/ | 7.64 |
| | C122S/Y149R/M157K/Q169K | |
| 688 | R35W/R36Q/H37S/V38S/T39Y/V41R/Y60bN/T97aE/L97bA/H99Q/C122S/Y149R/ | 8.04 |
| | Y151L/M157S/Q192H | |
| 752 | R35W/H37G/R37aE/V38E/T39Y/V41R/D60aP/Y60bD/T97aI/L97bA/H99Q/C122S/ | 8.07 |
| | Y151L/Q192T | |
| 19 | R35W/H37P/R37aN/V38E/T39Y/V41R/D60aP/Y60bL/T97aI/L97bA/H99Q/C122S/ | 8.13 |
| | Y149R | |
| 290 | F30Y/R35W/H37S/V38E/T39Y/Y40H/V41R/Y60bN/T97aE/L97bA/H99Q/C122S | 8.23 |
| 616 | F30Y/R35V/R36H/H37G/V38E/T39W/Y40H/V41R/Y60bA/T97aI/L97bA/H99Q/C122S/ | 8.3 |
| | Y149R/M157K | |
| 670 | F30Y/R35W/R36H/H37S/V38E/T39Y/Y40H/V41R/Y60bN/T97aE/L97bA/H99Q/C122S/ | 8.44 |
| | Y149R | |
| 285 | F30Y/R35W/H37S/V38E/T39Y/Y40H/V41R/Y60bN/T97aE/L97bA/H99Q/C122S/ | 8.44 |
| | Y149R | |
| 283 | F30Y/R35W/R36H/H37S/V38E/T39Y/Y40H/V41R/Y60bN/T97aE/L97bA/H99Q/C122S/ | 8.6 |
| | M157K | |
| 284 | F30Y/R35W/R36H/H37S/V38E/T39Y/Y40H/V41R/Y60bN/T97aE/L97bA/H99Q/C122S | 8.78 |
| 683 | F30Y/R35W/R36S/H37S/V38Q/T39Y/Y40L/V41R/Y60bN/T97aE/L97bA/H99Q/C122S/ | 8.86 |
| | Y149R/Y151L/M157S/Q192N | |
| 727 | F30Y/R35W/R36H/H37P/R37aD/V38E/T39Y/Y40F/V41R/D60aE/Y60bS/T97aE/L97bA/ | 8.9 |
| | H99Q/C122S/Y149R/M157K | |
| 799 | R35Q/H37Y/R37aS/V38E/T39Y/V41R/D60aP/Y60bE/T97aI/L97bA/H99Q/C122S/ | 8.95 |
| | Y149R | |
| 949 | R37aS/V38E/Y40V/V41R/H99L/C122S/Y151L/R217V | 9.04 |
| 831 | V38D/V41R/L97bG/H99Q/C122S/Y151L/R217E | 9.09 |
| 33 | R35Q/H37Y/R37aE/V38E/T39Y/V41R/D60aP/Y60bQ/T97aI/L97bA/H99Q/C122S | 9.27 |
| 624 | F30Y/R35V/R36H/H37D/V38E/T39W/Y40H/V41R/Y60bP/T97aI/L97bA/H99Q/C122S/ | 9.54 |
| | Y149R/M157K | |
| 223 | I17V/F30Y/R35Q/R36H/H37W/V38E/Y40H/V41R/T97aI/L97bA/H99Q/C122S/M157K | 9.65 |
| 617 | F30Y/R35V/R36H/H37S/V38E/T39F/Y40H/V41R/Y60bS/T97aM/L97bA/H99Q/C122S/ | 10.2 |
| | Y149W/M157K | |
| 703 | R35Y/H37S/R37aP/V38E/T39Y/V41R/D60aP/Y60bD/T97aI/L97bA/H99Q/C122S/ | 10.3 |
| | Y149R | |
| 706 | N26D/F30Y/R35Y/R36H/H37E/V38E/T39F/Y40F/V41R/K61E/T97aI/L97bA/H99Q/ | 10.3 |
| | R110dS/P114S/C122S/Y149R/M157K | |
| 732 | F30Y/R35W/R36H/H37P/R37aE/V38E/T39Y/Y40F/V41R/Y60bA/T97aE/L97bA/ | 10.3 |
| | H99Q/C122S/Y149R/M157K | |
| 796 | R35L/H37D/R37aN/V38E/T39Y/V41R/D60aP/T97aI/L97bA/H99Q/C122S/Y149R | 10.4 |
| 14 | F30Y/R35W/R36H/H37P/V38E/T39Y/Y40F/V41R/Y60bS/T97aE/L97bA/H99Q/C122S/ | 10.6 |
| | Y149K/M157K | |
| 29 | R35Q/H37Y/R37aE/V38E/T39Y/V41R/D60aP/T97aI/L97bA/H99Q/C122S/Y149R | 10.6 |
| 979 | R35H/V38E/T39Y/V41R/D60aP/Y60bQ/L97bA/H99Q/C122S/T158S/E167K | 10.6 |
| 24 | R35Q/H37Y/V38E/T39Y/V41R/D60aP/Y60bQ/T97aI/L97bA/H99Q/C122S/Y149R | 10.7 |
| 633 | F30Y/R35Y/R36H/H37D/V38E/T39W/Y40H/V41R/Y60bE/T97aI/L97bA/H99Q/C122S/ | 10.8 |
| | Y149R/M157K | |
| 12 | F30Y/R35Y/R36H/H37K/V38E/T39F/Y40F/V41R/T97aI/L97bA/H99Q/C122S/Y149R/ | 10.8 |
| | M157K | |
| 708 | F30Y/R35Y/R36H/H37E/V38E/T39F/Y40F/V41R/K61E/T97aI/L97bA/H99Q/C122S/ | 11.1 |
| | Y149R/M157K/T242A | |
| 557 | F30Y/R35L/V38D/Y40H/V41R/L97bA/H99Q/C122S/M157K/T158A | 11.3 |
| 724 | F30Y/R35Y/R36H/H37P/R37aQ/V38E/T39Y/Y40F/V41R/Y60bH/T97aE/L97bA/H99Q/ | 11.3 |
| | C122S/Y149R/M157K | |
| 882 | V38D/V41R/L97bR/H99E/C122S/Y151L/R217E | 11.4 |
| 335 | H37G/R37aD/G37bD/V38F/T39H/V41R/Y60bK/T97aS/L97bR/H99E/C122S/Y151L/ | 11.5 |
| | E175D/R217E/K224R | |
| 746 | R35Y/H37V/R37aW/V38E/T39Y/V41R/D60aP/Y60bE/T97aI/L97bA/H99Q/C122S/ | 11.6 |
| | Y151L/Q192T | |
| 615 | F30Y/R35M/R36H/H37G/V38E/T39F/Y40H/V41R/Y60bP/T97aF/L97bA/H99Q/C122S/ | 11.7 |
| | Y149R/M157K | |
| 684 | F30Y/R35W/R36Q/H37S/V38T/T39Y/Y40L/V41R/Y60bN/T97aE/L97bA/H99Q/C122S/ | 11.8 |
| | Y149R/Y151L/M157K/Q192T | |
| 701 | R35W/H37D/R37aP/V38E/T39W/V41R/D60aR/Y60bS/T97aI/L97bA/H99Q/C122S/ | 11.8 |
| | Y149R | |
| 260 | I17V/F30Y/R35W/R36H/H37E/V38E/T39W/Y40H/V41R/Y60bQ/T97aE/L97bA/H99Q/ | 11.9 |
| | C122S/Y149K/M157K | |
| 218 | I17V/F30Y/R35Q/H37W/V38D/Y40H/V41R/Y60bN/L97bA/H99Q/C122S/Y149H/ | 12 |
| | M157K/T158A | |
| 978 | R35H/V38E/T39Y/V41R/D60aP/Y60bQ/L97bA/H99Q/C122S/I138V/E167K | 12.1 |
| 680 | F30Y/R35W/R36Q/H37S/V38E/T39Y/Y40L/V41R/Y60bN/T97aE/L97bA/H99Q/C122S/ | 12.4 |
| | Y149R/Y151L/M157T/Q192H | |
| 980 | R35H/G37bD/V38E/T39Y/V41R/D60aP/Y60bQ/L97bA/H99Q/C122S/T158S | 12.4 |
| 794 | R35H/H37P/R37aG/V38E/T39F/V41R/D60aP/Y60bE/T97aI/L97bA/H99Q/C122S/ | 12.6 |
| | Y149R | |
| 611 | F30Y/R35W/R36H/H37S/V38E/T39Y/Y40H/V41R/Y60bN/T97aE/L97bA/H99Q/C122S/ | 12.7 |
| | Y149R/M157K | |
| 926 | V38D/T39Y/Y40L/V41R/L97bI/H99E/C122S/R217E | 12.8 |
| 224 | F30Y/R36H/V38E/Y40H/V41R/T97aI/L97bA/H99Q/C122S/M157K/T158A | 12.9 |
| 689 | F30H/R35W/R36H/H37S/V38E/T39Y/Y40M/V41R/Y60bN/T97aE/L97bA/H99Q/ | 13 |
| | C122S/Y149R/M157K | |
| 650 | R35V/R36H/H37D/V38E/T39W/Y40M/V41R/T97aI/L97bA/H99Q/C122S/Y149R/ | 13.1 |
| | M157K | |
| 685 | R35W/R36K/H37S/V38A/T39Y/V41R/Y60bN/T97aE/L97bA/H99Q/C122S/Y149R/ | 13.3 |
| | Y151L/M157R/Q192T | |
| 628 | F30Y/R35W/R36H/H37D/V38E/T39Y/Y40H/V41R/Y60bA/T97aI/L97bA/H99Q/C122S/ | 13.5 |
| | Y149R/M157K | |
| 717 | F30Y/R35W/R36H/H37S/V38E/T39Y/Y40F/V41R/Y60bN/T97aE/L97bA/H99Q/C122S/ | 13.6 |
| | N145S/S146V/T147M/D148G/Y149Q/L150F/M157K | |
| 275 | F30Y/R35Y/R36H/H37K/V38E/T39F/Y40F/V41R/T97aI/L97bA/H99Q/Y149R/M157K | 13.7 |
| 658 | F30Y/R35I/R36H/H37D/V38E/T39F/Y40F/V41R/T97aI/L97bA/H99Q/C122S/Y149R/ | 14.1 |
| | M157K | |
| 373 | R35V/V38E/Y40Q/V41L/Y60bS/T97aE/L97bA/H99Q/C122S/Y149R | 14.4 |
| 800 | R35Q/H37Y/R37aP/V38E/T39Y/V41R/D60aN/Y60bN/T97aI/L97bA/H99Q/C122S/ | 14.5 |
| | Y149R | |
| 957 | V38E/Y40Q/V41L/L97bG/H99Q/C122S/R217T | 14.5 |
| 983 | R35H/V38E/T39Y/V41R/T56S/D60aP/Y60bQ/L97bA/H99Q/C122S/T158S | 14.6 |
| 513 | F30H/R35Q/H37W/V38D/V41R/L97bA/H99Q/C122S/Y151L/M157K | 14.7 |
| 300 | R35Q/H37Y/V38E/T39Y/V41R/D60aP/T97aI/L97bA/H99Q/C122S/Y149R | 14.7 |
| 745 | R35W/H37P/R37aN/V38E/T39Y/V41K/D60aP/Y60bD/T97aI/L97bA/H99Q/C122S/ | 14.8 |
| | Y151L/Q192A | |
| 821 | V38D/V41R/Y60bR/T97aW/L97bR/H99E/C122S/E175D/R217E/K224R | 14.8 |
| 674 | F30Y/R35W/R36H/H37S/V38E/Y40H/Y60bN/T97aI/L97bA/H99Q/C122S/Y149R | 15.1 |
| 823 | V38D/V41L/Y60bP/T97aM/L97bR/H99E/C122S/Y151L/E175D/R217E/K224R | 15.3 |
| 627 | F30Y/R35W/R36H/H37D/V38E/T39F/Y40H/V41R/Y60bE/T97aI/L97bA/H99Q/C122S/ | 15.4 |
| | Y149R/M157K | |
| 13 | F30Y/R35W/R36H/H37N/V38E/T39Y/Y40F/V41R/Y60bS/T97aE/L97bA/H99Q/C122S/ | 15.7 |
| | Y149K/M157K | |
| 681 | F30Y/R35W/R36K/H37S/V38D/T39Y/Y40L/V41R/Y60bN/T97aE/L97bA/H99Q/C122S/ | 15.9 |
| | Y149R/Y151L/M157R/Q192T | |
| 382 | V41R/H99Q/C122S/Y151L/R217V | 16 |
| 959 | V38E/Y40P/V41L/L97bG/H99L/C122S/Y151Q/R217E | 16 |
| 950 | V38E/Y40L/V41R/H99L/C122S/Y151L/R217S | 16.1 |
| 956 | V38E/Y40Q/V41L/L97bG/H99Q/C122S/Y151P/R217T | 16.4 |
| 973 | V38E/T39Y/V41R/D60aW/Y60bP/L97bR/H99I/C122S | 16.4 |
| 20 | R35W/H37D/R37aP/V38E/T39W/V41R/Y60bA/T97aI/L97bA/H99Q/C122S/Y149R | 16.6 |
| 597 | F30Y/R36H/H37F/V38E/T39Y/Y40H/V41R/Y60bD/T97aV/L97bA/H99Q/C122S/ | 16.8 |
| | Y149L/M157K | |
| 664 | F30Y/R35W/R36H/H37E/S37dP/V38E/T39W/Y40H/V41R/Y60bQ/T97aE/L97bA/ | 16.8 |
| | H99Q/C122S/Y149K/M157K | |
| 733 | R35Q/H37Y/R37aE/V38E/T39Y/V41R/D60aA/Y60bP/T97aI/L97bA/H99Q/C122S/ | 17.4 |
| | Y149R | |
| 469 | R36H/V38D/V41R/A96D/D97E/A98G/T97adel/H99L/L97bdel/C122S/T178S/R217D | 17.5 |
| 830 | V38D/V41R/L97bG/H99Q/C122S/Y151L/R217A | 17.7 |
| 653 | F30H/R35Q/R36H/H37Y/V38E/T39Y/Y40L/V41R/T97aI/L97bA/H99Q/C122S/Y149R/ | 17.8 |
| | M157K | |
| 264 | F30Y/R35W/R36K/H37E/V38E/T39W/Y40H/V41R/Y60bQ/K61E/I65T/T97aE/L97bA/ | 17.9 |
| | H99Q/C122S/Y149K/M157K | |
| 604 | F30Y/R35W/R36H/H37D/V38E/T39Y/Y40H/V41R/Y60bS/T97aL/L97bA/H99Q/C122S/ | 18 |
| | Y149L/M157K | |
| 714 | F30Y/R35Q/R36H/H37Y/R37aE/V38E/T39Y/Y40F/V41R/D60aS/Y60bP/T97aE/L97bA/ | 18.1 |
| | H99Q/C122S/Y149R/M157K | |
| 743 | R35Q/H37Y/R37aE/V38E/T39Y/V41R/D60aG/Y60bS/T97aI/L97bA/H99Q/C122S/ | 18.1 |
| | Y149R | |
| 666 | I24N/F30Y/R35W/R36H/H37E/V38E/T39W/Y40L/V41R/Y60bQ/N87D/T97aE/L97bA/ | 18.2 |
| | H99Q/C122S/Y149K/M157K | |
| 36 | V38E/Y40Q/V41L/L97bA/H99Q/C122S | 18.2 |
| 217 | F30Y/R35Q/H37W/V38D/Y40H/V41R/Y60bN/L97bA/H99Q/C122S/Y149H/M157K/ | 18.3 |
| | T158A | |
| 263 | F30Y/R35W/R36A/H37E/V38E/T39W/Y40H/V41R/Y60bQ/K61D/I65R/T97aE/L97bA/ | 18.4 |
| | H99Q/C122S/Y149K/M157K | |
| 221 | F30Y/R35Q/R36H/H37W/V38E/Y40H/V41R/T97aI/L97bA/H99Q/C122S/M157K | 18.6 |
| 289 | F30Y/R35Y/R36H/H37K/V38E/T39F/Y40F/V41R/T97aI/L97bA/H99Q/C122S/Y149R/ | 18.9 |
| | M157K/K187R/K223R/K224R | |
| 687 | R35W/R36Q/H37S/V38E/T39Y/Y40L/V41R/Y60bN/T97aE/L97bA/H99Q/C122S/ | 19 |
| | Y149R/Y151L/M157S/Q192T | |
| 986 | R35H/V38E/T39Y/V41R/D60aP/Y60bQ/P60cS/L97bA/H99Q/C122S/I138V/E167K | 19.4 |
| 18 | R35Q/H37Y/R37aE/V38E/T39Y/V41R/D60aT/Y60bT/T97aI/L97bA/H99Q/C122S/ | 19.5 |
| | Y149R | |
| 222 | I17V/F30Y/R36H/V38E/Y40H/V41R/T97aI/L97bA/H99Q/C122S/M157K | 19.6 |
| 271 | R35Y/R36H/H37K/V38E/T39F/V41R/T97aI/L97bA/H99Q/C122S/Y149R/M157K | 19.9 |
| 982 | R35H/V38E/T39Y/V41R/T56A/D60aP/Y60bQ/L97bA/H99Q/C122S | 19.9 |
| 538 | F30Y/V38D/Y40F/V41L/L97bA/H99Q/C122S/Y151L/M157R | 20.2 |
| 953 | V38E/Y40A/V41L/L97bG/H99Q/C122S/R217T | 20.4 |
| 665 | I24T/F30Y/R35W/R36H/H37E/V38E/T39W/Y40H/V41R/Y60bQ/T97aE/L97bA/H99Q/ | 20.6 |
| | C122S/Y149K/M157K | |
| 292 | F30Y/R35W/R36H/H37S/V38E/T39Y/Y40F/V41R/Y60bN/T97aE/L97bA/H99Q/C122S/ | 20.7 |
| | Y149R/M157K | |
| 219 | I17V/F30Y/V38D/Y40H/V41R/L97bA/H99Q/C122S/M157K/T158A | 21.6 |
| 747 | R35W/H37P/R37aN/V38E/T39Y/V41K/D60aP/Y60bD/T97aI/L97bA/H99Q/C122S/ | 21.7 |
| | Y151L/Q192T | |
| 514 | F30H/R35L/H37D/V38D/V41R/L97bA/H99Q/C122S/Y151L/M157K/R217E | 21.8 |
| 713 | F30Y/R35W/R36H/H37D/R37aE/V38E/T39Y/Y40F/V41R/D60aE/Y60bF/T97aE/L97bA/ | 21.8 |
| | H99Q/C122S/Y149R/M157K | |
| 619 | F30Y/R35L/R36H/H37G/V38E/T39Y/Y40H/V41R/Y60bP/T97aE/L97bA/H99Q/C122S/ | 22.1 |
| | Y149M/M157K | |
| 505 | I17V/F30H/V38D/V41R/L97bA/H99Q/C122S/Y151L/M157K | 22.2 |
| 623 | F30Y/R35V/R36H/H37K/V38E/T39F/Y40H/V41R/Y60bN/T97aI/L97bA/H99Q/C122S/ | 22.6 |
| | Y149R/M157K | |
| 11 | R35W/R36H/H37N/V38E/T39F/Y40F/V41R/T97aI/L97bA/H99Q/C122S/Y149R/ | 22.8 |
| | M157K/Q192H | |
| 360 | R35V/Y40Q/V41L/Y60bS/T97aE/L97bA/H99Q/C122S/Y149R | 22.8 |
| 729 | F30Y/R35M/R36H/H37G/R37aE/V38E/T39Y/Y40F/V41R/D60aP/Y60bS/T97aE/L97bA/ | 22.9 |
| | H99Q/C122S/Y149R/M157K | |
| 834 | R35Q/V38D/V41R/L97bG/H99Q/C122S/Y151L | 22.9 |
| 961 | R37aS/V38E/Y40P/V41L/L97bG/H99Q/C122S/Y151Q/R217T | 23.4 |
| 364 | R35V/R37aE/V38E/Y40Q/V41L/T97aE/L97bA/H99Q/C122S/Y149R | 23.5 |
| 486 | F30H/V38D/V41R/A96G/L97bA/H99Q/C122S/Y151L/M157K | 23.7 |
| 311 | T39L/Y40L/V41R/T97aI/L97bA/H99Q/C122S | 23.7 |
| 265 | F30Y/R35W/R36H/H37E/V38E/T39Y/Y40F/V41R/Y60bQ/T97aE/L97bA/H99Q/C122S/ | 23.8 |
| | Y149R/M157K | |
| 34 | Y40Q/V41L/Y60bL/L97bA/H99Q/C122S | 23.9 |
| 586 | F30Y/R36H/V38E/Y40H/V41R/T97aI/L97bA/H99Q/C122S/S146F/M157K/Q192H/ | 24.1 |
| | K243Q | |
| 346 | Y40Q/V41L/L97bA/H99Q/C122S/Y149R | 24.1 |
| 262 | F30Y/R35W/R36Q/H37E/V38E/T39W/Y40H/V41R/Y60bQ/K61L/I65V/T97aE/L97bA/ | 24.4 |
| | H99Q/C122S/Y149K/M157K | |
| 21 | R35Q/H37Y/R37aE/V38E/T39Y/V41R/D60aP/Y60bQ/T97aI/L97bA/H99Q/C122S/ | 24.5 |
| | Y149R | |
| 832 | R35Q/V38D/V41R/T97aS/L97bA/H99Q/C122S/Y151L | 24.8 |
| 369 | V41R/L97bR/H99Q/C122S/Y151L/R217V | 25.1 |
| 30 | R35Q/H37Y/R37aE/V38E/T39Y/V41R/D60aP/Y60bQ/L97bA/H99Q/C122S/Y149R | 25.3 |
| 621 | F30Y/R35V/R36H/H37S/V38E/T39Y/Y40H/V41R/Y60bP/T97aE/L97bA/H99Q/C122S/ | 25.4 |
| | Y149E/M157K | |
| 754 | R35A/H37T/R37aD/V38E/T39Y/V41R/D60aP/Y60bD/T97aI/L97bA/H99Q/C122S/ | 25.5 |
| | Y151L/Q192S | |
| 835 | R35S/V38D/V41R/L97bA/H99Q/C122S/Y151L | 25.7 |
| 836 | R35S/V38D/V41L/L97bG/H99Q/C122S/Y151L/R217Q | 26.1 |
| 562 | F30Y/R35H/V38D/Y40H/V41R/L97bA/H99Q/C122S/M157K/T158S | 26.3 |
| 738 | R35Q/H37S/R37aE/V38E/T39Y/V41R/D60aP/Y60bS/T97aI/L97bA/H99Q/C122S/ | 26.3 |
| | Y149R | |
| 338 | H37G/R37aD/V38F/T39H/V41R/Y60bK/L97bR/H99E/C122S/Y151L/E175D/Q192T/ | 26.7 |
| | R217E/K224R | |
| 341 | H37G/R37aD/V38F/T39H/V41R/Y60bK/L97bR/H99E/C122S/Y151L/E175D/Q192T/ | 26.8 |
| | R217E | |
| 741 | R35W/H37D/R37aS/V38E/T39Y/V41R/D60aE/Y60bS/T97aI/L97bA/H99Q/C122S/ | 26.9 |
| | Y149R | |
| 795 | R35Q/H37G/R37aD/V38E/T39Y/V41R/D60aP/Y60bA/T97aI/L97bA/H99Q/C122S/ | 27.1 |
| | Y149R | |
| 798 | R35Q/H37D/R37aK/V38E/T39F/V41R/D60aP/Y60bS/T97aI/L97bA/H99Q/C122S/ | 27.1 |
| | Y149R | |
| 671 | R35Y/R36H/H37S/V38D/T39Y/V41R/Y60bN/T97aI/L97bA/H99Q/C122S/Y149R | 27.3 |
| 230 | F30Y/R36H/V38E/Y40H/V41R/K61E/T97aI/L97bA/H99Q/C122S/M157K | 27.9 |
| 829 | R37aS/V38D/V41Q/L97bG/H99Q/C122S/Y151L/R217T | 27.9 |
| 484 | F30H/V38D/V41R/L97bA/H99Q/C122S/Y151L/M157K | 28.1 |
| 693 | F30Y/R35K/R36H/H37E/R37aK/V38E/T39F/Y40F/V41R/D60aP/Y60bS/T97aI/L97bA/ | 28.1 |
| | H99Q/C122S/Y149R/M157K | |
| 694 | F30Y/R35Q/R36H/H37G/R37aE/V38E/T39Y/Y40F/V41R/D60aP/Y60bG/T97aI/L97bA/ | 28.3 |
| | H99Q/C122S/Y149R/M157K | |
| 261 | F30Y/R35W/R36Q/H37E/V38A/T39W/Y40H/V41R/Y60bQ/K61D/I65V/T97aE/L97bA/ | 28.4 |
| | H99Q/C122S/Y149K/M157K | |
| 494 | F30Y/R35H/V38D/Y40H/V41R/T56A/L97bA/H99Q/C122S/M157K | 28.5 |
| 797 | R35N/H37T/R37aY/V38E/T39Y/V41R/D60aP/Y60bE/T97aI/L97bA/H99Q/C122S/ | 28.7 |
| | Y149R | |
| 984 | R37aH/V38E/T39Y/V41R/T56A/D60aP/Y60bQ/L97bA/H99Q/C122S/T158A | 28.8 |
| 515 | F30H/R35Q/H37T/V38D/V41R/L97bA/H99Q/C122S/Y151L/M157K | 28.9 |
| 503 | F30H/R36L/V38E/V41R/K82R/L97bA/H99Q/C122S/Y151L/M157K | 29 |
| 370 | V38D/V41R/H99Q/C122S/Y151L/R217V | 29.1 |
| 736 | R35Q/H37G/R37aP/V38E/T39Y/V41R/D60aP/Y60bE/T97aI/L97bA/H99Q/C122S/ | 29.2 |
| | Y149R | |
| 726 | F30Y/R35Q/R36H/H37Y/R37aE/V38E/T39Y/Y40F/V41R/D60aE/Y60bA/T97aE/L97bA/ | 29.3 |
| | H99Q/C122S/Y149R/M157K | |
| 704 | R35Q/H37Y/R37aD/V38E/T39L/V41R/D60aE/Y60bT/T97aI/L97bA/H99Q/C122S/ | 29.4 |
| | Y149R | |
| 657 | F30Y/R35L/R36H/H37E/V38E/T39N/Y40F/V41R/T97aI/L97bA/H99Q/C122S/Y149R/ | 29.6 |
| | M157K | |
| 963 | R36S/V38E/Y40L/V41N/L97bG/H99Q/C122S/Y151L/R217T | 29.6 |
| 401 | T39W/V41R/L97bG/H99Q/C122S | 29.7 |
| 9 | F30Y/R35W/R36H/H37E/V38E/T39W/Y40H/V41R/Y60bQ/T97aE/L97bA/H99Q/ | 29.8 |
| | C122S/Y149K/M157K | |
| 28 | R35Q/H37Y/R37aE/V38E/T39Y/V41R/Y60bQ/T97aI/L97bA/H99Q/C122S/Y149R | 29.8 |
| 940 | R35S/R37aA/V38E/Y40Q/V41L/L97bA/H99Q/C122S/Y149V | 30.2 |
| 612 | F30Y/R35W/R36H/H37Q/V38E/T39H/Y40H/V41R/T97aE/L97bA/H99Q/C122S/Y149L/ | 30.3 |
| | M157K | |
| 715 | F30Y/R35Q/R36H/H37Y/R37aD/V38E/T39Y/Y40F/V41R/Y60bV/T97aE/L97bA/ | 30.4 |
| | H99Q/C122S/Y149R/M157K | |
| 171 | F30H/V38D/V41R/L97bA/H99Q/Y151L/M157K | 30.6 |
| 511 | F30H/R35H/H37I/V38D/V41R/L97bA/H99Q/C122S/Y149W/Y151L/M157K/R217S | 30.6 |
| 875 | V38D/T39Y/Y40H/V41R/T97aI/L97bA/H99Q/C122S | 30.7 |
| 702 | R35F/H37D/R37aN/V38E/T39Y/V41R/Y60bS/T97aI/L97bA/H99Q/C122S/Y149R | 30.9 |
| 402 | T39Y/V41R/Y60bQ/L97bG/H99Q/C122S | 31.1 |
| 398 | T39Y/V41R/D60aP/Y60bQ/L97bA/H99Q/C122S | 31.4 |
| 881 | V38D/V41R/L97bR/H99Q/C122S/Y151L/R217E | 31.5 |
| 924 | R36S/V38D/T39L/Y40L/V41R/L97bI/H99E/C122S/R217T | 31.5 |
| 936 | R35S/R37aD/V38E/Y40Q/V41L/Y60bV/T97aL/L97bA/H99Q/C122S/Y149L | 31.5 |
| 350 | Y40Q/V41L/Y60bT/T97aE/L97bA/H99Q/C122S/Y149R | 31.6 |
| 496 | F30Y/V38E/Y40H/V41R/T56A/L97bA/H99Q/C122S/M157K/K243M | 31.9 |
| 231 | F30Y/R36H/R37aH/V38E/Y40H/V41R/K61E/T97aI/L97bA/H99Q/C122S/M157K | 31.9 |
| 516 | F30H/R35Q/V38D/V41R/L97bA/H99Q/C122S/Y151L/M157K | 32 |
| 818 | V38D/V41R/Y60bK/T97aS/L97bR/H99E/C122S/Y151L/E175D/Q192T/R217E/K224R | 32 |
| 324 | H37G/G37bD/V38F/T39H/V41R/Y60bK/T97aS/L97bR/H99E/C122S/Y151L/E175D/ | 32.1 |
| | Q192T/R217E/K224R | |
| 948 | R35S/R37aD/V38E/Y40Q/V41L/T97aE/L97bA/H99Q/C122S/Y149R | 32.2 |
| 368 | R35V/R37aE/V38E/Y40Q/V41L/Y60bS/T97aE/L97bA/H99Q/C122S | 32.2 |
| 351 | Y40Q/V41L/Y60bS/T97aE/L97bA/H99Q/C122S/Y149R | 32.5 |
| 551 | F30Y/R35H/V38D/Y40H/V41R/L97bA/H99Q/C122S/I138V/M157K | 33.1 |
| 43 | T39Y/V41R/Y60bQ/L97bA/H99Q/C122S | 33.2 |
| 696 | F30Y/R35H/R36H/H37D/R37aE/V38E/T39Y/Y40F/V41R/D60aP/Y60bD/T97aI/L97bA/ | 33.4 |
| | H99Q/C122S/Y149R/M157K | |
| 495 | F30Y/V38D/Y40H/V41R/L97bA/H99Q/C122S/M157K/T158A | 33.5 |
| 972 | V38E/T39W/V41R/D60aP/Y60bD/L97bA/H99L/C122S | 33.5 |
| 242 | F30Y/R36H/V38E/Y40H/V41R/I65T/T97aI/L97bA/H99Q/C122S/M157K | 33.6 |
| 884 | V38D/V41R/L97bR/H99Q/C122S/Y151L/R217V | 33.7 |
| 801 | R35Q/H37S/R37aP/V38E/T39Y/V41R/D60aP/Y60bE/T97aI/L97bA/H99Q/C122S/ | 33.8 |
| | Y149R | |
| 673 | R35W/R36H/H37S/V38E/T39Y/V41R/Y60bN/T97aE/L97bA/H99Q/C122S/Y149R/ | 34 |
| | M157K | |
| 958 | R36S/V38E/Y40Q/V41R/L97bG/H99L/C122S/Y151P/R217E | 34.3 |
| 15 | V38E/Y40Q/V41L/Y60bL/L97bA/H99Q/C122S | 34.5 |
| 340 | H37G/R37aD/G37bD/V38F/T39H/V41R/Y60bK/L97bR/H99E/C122S/Y151L/E175D/ | 34.5 |
| | Q192T/R217E | |
| 339 | H37G/R37aD/V38F/T39H/V41R/Y60bK/T97aS/L97bR/H99E/C122S/Y151L/E175D/ | 34.8 |
| | Q192T/R217E | |
| 282 | F30Y/R35Y/R36H/H37K/V38E/T39F/Y40F/V41R/T97aI/L97bA/H99Q/C122S/Y149R/ | 34.9 |
| | M157K/K187S/K223S/K224Y | |
| 39 | Y40Q/V41L/L97bA/H99Q/C122S | 35.2 |
| 504 | F30H/R35H/V38D/V41R/K61E/L97bA/H99Q/C122S/Y151L/M157K/R206H | 35.4 |
| 8 | F30Y/V38D/Y40H/V41R/L97bA/H99Q/C122S/M157K | 35.7 |
| 273 | F30Y/R36H/V38E/Y40H/V41R/T97aE/L97bA/H99Q/C122S/Y149R/M157K | 35.7 |
| 943 | R35A/R37aE/V38E/Y40Q/V41L/L97bA/H99Q/C122S/Y149R | 35.9 |
| 827 | V38D/V41L/L97bG/H99Q/C122S/Y151L/R217Q | 36.2 |
| 517 | F30H/R35Q/H37W/V38D/V41R/D60aE/L97bA/H99Q/C122S/Y149L/Y151L/M157K/ | 36.4 |
| | R217D | |
| 620 | F30Y/R35F/R36H/H37G/V38E/T39Y/Y40H/V41R/Y60bS/T97aD/L97bA/H99Q/C122S/ | 36.7 |
| | Y149R/M157K | |
| 399 | T39Y/V41R/L97bG/H99Q/C122S | 36.8 |
| 608 | F30Y/R35I/R36H/H37E/V38E/T39Y/Y40H/V41R/Y60bS/T97aV/L97bA/H99Q/C122S/ | 36.9 |
| | Y149L/M157K | |
| 934 | R35S/R37aD/V38E/Y40Q/V41L/L97bA/H99Q/C122S/Y149R | 37.2 |
| 387 | Y40H/V41Q/L97bG/H99Q/C122S/R217T | 37.2 |
| 645 | R35W/H37D/V38D/T39Y/V41R/Y60bS/L97bA/H99Q/C122S/Y149R | 37.4 |
| 869 | V38D/T39F/Y40L/V41R/T97aW/L97bA/H99Q/C122S | 37.8 |
| 878 | V38D/T39Y/Y40L/V41R/T97aE/L97bA/H99Q/C122S | 37.8 |
| 718 | F30Y/R35Q/R36H/H37G/R37aE/V38E/T39F/Y40F/V41R/D60aP/Y60bS/T97aE/L97bA/ | 38.2 |
| | H99Q/C122S/Y149R/M157K | |
| 873 | V38D/T39L/Y40L/V41R/T97aI/L97bA/H99Q/C122S | 38.2 |
| 876 | V38D/T39Y/Y40L/V41R/T97aW/L97bA/H99Q/C122S | 38.4 |
| 550 | F30Y/R36H/V38D/Y40H/V41R/L97bA/H99L/C122S/F141L/M157K/T158A | 38.5 |
| 728 | F30Y/R35Q/R36H/H37G/R37aE/V38E/T39Y/Y40F/V41R/D60aA/Y60bS/T97aE/L97bA/ | 38.5 |
| | H99Q/C122S/Y149R/M157K | |
| 712 | F30Y/R35Q/R36H/H37G/R37aE/V38E/T39Y/Y40F/V41R/D60aP/Y60bS/T97aE/L97bA/ | 38.6 |
| | H99Q/C122S/Y149R/M157K | |
| 404 | T39Y/V41R/Y60bP/L97bG/H99Q/C122S | 39.2 |
| 507 | F30H/R36H/V38D/V41R/T56A/L97bA/H99Q/C122S/Y151L/M157K | 40 |
| 720 | F30Y/R35E/R36H/H37D/R37aN/V38E/T39Y/Y40F/V41R/Y60bN/T97aE/L97bA/ | 40 |
| | H99Q/C122S/Y149R/M157K | |
| 268 | V38E/Y40Q/V41L/D60aP/Y60bL/L97bA/H99Q/C122S/Y149W | 40.4 |
| 498 | F30Y/R36H/V38E/Y40H/V41R/T97aI/L97bA/H99Q/C122S/M157K | 40.5 |
| 509 | F30H/R35Q/H37W/V38D/V41R/D60aE/Y60bS/L97bA/H99Q/C122S/Y149L/Y151L/ | 40.8 |
| | M157K | |
| 742 | R35Q/H37G/R37aE/V38E/T39Y/V41R/D60aP/Y60bT/T97aI/L97bA/H99Q/C122S/ | 40.9 |
| | Y149R | |
| 686 | F30Y/R35W/R36H/H37S/V38E/T39Y/Y40H/V41R/Y60bN/T97aE/L97bA/H99Q/C122S/ | 41 |
| | Y149R/Y151P/M157K/Q192H | |
| 710 | F30Y/R35M/R36H/H37D/R37aD/V38E/T39Y/Y40F/V41R/D60aP/Y60bS/T97aE/L97bA/ | 41.2 |
| | H99Q/C122S/Y149R/M157K | |
| 618 | F30Y/R35W/R36H/H37D/V38E/T39Y/Y40H/V41R/Y60bT/T97aD/L97bA/H99Q/ | 41.3 |
| | C122S/Y149R/M157K | |
| 872 | V38D/T39L/Y40L/V41R/T97aV/L97bA/H99Q/C122S | 41.6 |
| 822 | V38D/V41R/Y60bS/T97aI/L97bR/H99E/C122S/Y151L/E175D/Q192F/R217E/K224R | 42.1 |
| 403 | T39Y/V41R/Y60bP/L97bA/H99Q/C122S | 42.1 |
| 446 | R36H/V38D/Y40F/V41R/D97E/A98G/T97adel/H99L/L97bdel/C122S/Y151L/Q192E/ | 42.2 |
| | R217D | |
| 735 | R35M/H37G/R37aD/V38E/T39W/V41R/D60aP/Y60bD/T97aI/L97bA/H99Q/C122S/ | 42.3 |
| | Y149R | |
| 543 | F30Y/V38D/Y40L/V41R/L97bA/H99Q/C122S/Y151L/M157K/Q192H | 42.4 |
| 475 | F30H/V38D/Y40F/V41R/L97bA/H99Q/C122S/Y151L/M157F | 42.5 |
| 697 | H37M/R37aD/V38E/T39A/V41R/D60aP/Y60bS/T97aI/L97bA/H99Q/C122S/Y149R | 42.7 |
| 171 | F30H/V38D/V41R/L97bA/H99Q/Y151L/M157K | 42.8 |
| 552 | T22I/F30Y/R35S/V38D/Y40H/V41R/L97bA/H99Q/C122S/I138V/M157K | 42.9 |
| 734 | R35L/H37D/R37aS/V38E/T39Y/V41R/D60aP/Y60bD/T97aI/L97bA/H99Q/C122S/ | 42.9 |
| | Y149R | |
| 561 | F30Y/R35L/V38D/Y40H/V41R/N76S/L97bA/H99Q/C122S/M157K/K187E | 43.6 |
| 481 | F30H/V38D/V41R/L97bA/H99Q/C122S/Y151L/M157S | 43.8 |
| 648 | R35W/H37D/V38D/T39Y/V41R/Y60bH/L97bA/H99Q/C122S/Y149R | 44.2 |
| 595 | F30Y/R36H/H37G/V38E/T39W/Y40H/V41R/Y60bA/T97aE/L97bA/H99Q/C122S/ | 44.6 |
| | Y149Q/M157K | |
| 904 | R35Q/H37G/R37aE/V38W/T39Y/V41R/Y60bK/T97aS/L97bR/H99E/C122S/Y151L/ | 44.6 |
| | E175D/Q192T/R217E/K224R | |
| 330 | H37G/R37aD/G37bD/V38F/T39H/V41R/Y60bK/L97bR/H99E/C122S/Y151L/E175D/ | 44.6 |
| | Q192T/R217E/K224R | |
| 879 | V38D/T39Y/Y40M/V41R/T97aE/L97bA/H99Q/C122S | 45 |
| 647 | R35Q/H37N/V38D/T39Y/V41R/Y60bP/L97bA/H99Q/C122S | 45.4 |
| 663 | F30Y/R35W/R36H/H37D/V38E/T39Y/Y40F/V41R/Y60bS/T97aE/L97bA/H99Q/C122S/ | 45.8 |
| | Y149K/M157K | |
| 23 | R35Q/R37aE/V38E/T39Y/V41R/D60aP/Y60bQ/T97aI/L97bA/H99Q/C122S/Y149R | 46.1 |
| 975 | V38E/T39L1V41R/D60aN/Y60bP/L97bG/H99Q/C122S | 46.8 |
| 601 | F30Y/R36H/H37A/V38E/T39Y/Y40H/V41R/Y60bQ/T97aV/L97bA/H99Q/C122S/ | 46.9 |
| | Y149R/M157K | |
| 722 | F30Y/R35W/R36H/H37E/R37aP/V38E/T39Y/Y40F/V41R/Y60bN/T97aE/L97bA/ | 47.7 |
| | H99Q/C122S/Y149Q/M157K | |
| 748 | H37T/R37aL/V38E/T39Y/V41R/D60aP/Y60bD/T97aI/L97bA/H99Q/C122S/Y151L/ | 47.9 |
| | Q192R | |
| 325 | H37G/R37aD/V38F/T39H/V41R/Y60bK/T97aS/L97bR/H99E/C122S/Y151L/E175D/ | 47.9 |
| | Q192T/R217E/K224R | |
| 667 | F30Y/R35W/R36H/H37S/V38E/Y40H/Y60bN/T97aE/L97bA/H99Q/C122S/Y149R/ | 48.6 |
| | M157K | |
| 868 | V38D/T39W/Y40L/V41R/T97aL/L97bA/H99Q/C122S | 48.9 |
| 326 | H37G/R37aD/G37bD/T39H/V41R/Y60bK/T97aS/L97bR/H99E/C122S/Y151L/E175D/ | 49 |
| | Q192T/R217E/K224R | |
| 42 | T39Y/V41R/L97bA/H99Q/C122S | 49 |
| 874 | V38D/T39L/Y40L/V41R/T97aW/L97bA/H99Q/C122S | 49.1 |
| 584 | F30Y/R36H/V38E/Y40H/V41R/T97aI/L97bA/H99Q/C122S/Y149N/L150V/M157K | 49.3 |
| 534 | R35S/V38D/L97bA/H99Q/C122S/Y151L/M157Y | 49.8 |
| 925 | R37aS/V38D/T39Y/Y40F/V41R/H99L/C122S/R217T | 49.9 |
| 349 | Y40Q/V41L/Y60bE/L97bA/H99Q/C122S/Y149R | 49.9 |
| 390 | Y40H/V41T/L97bG/H99Q/C122S/R217T | 50 |
| 506 | F30H/R35S/V38E/V41R/Y60bH/L97bA/H99Q/C122S/Y151L/M157K | 50.1 |
| 877 | V38D/T39Y/Y40M/V41R/T97aW/L97bA/H99Q/C122S | 50.1 |
| 900 | H37G/R37aD/G37bD/V38F/T39H/V41R/Y60bK/T97aS/L97bR/H99E/C122S/Y151L/ | 50.9 |
| | E175D/Q192T/R217E/K224R | |
| 737 | R35A/H37G/R37aE/V38E/T39F/V41R/D60aE/Y60bP/T97aI/L97bA/H99Q/C122S/ | 51.1 |
| | Y149R | |
| 22 | H37Y/R37aE/V38E/T39Y/V41R/D60aP/Y60bQ/T97aI/L97bA/H99Q/C122S/Y149R | 51.1 |
| 598 | F30Y/R36H/H37N/V38E/T39Y/Y40H/V41R/Y60bQ/T97aV/L97bA/H99Q/C122S/ | 51.4 |
| | Y149L/M157K | |
| 545 | F30Y/V38D/Y40L//V41R/L97bA/H99Q/C122S/Y151L/M157A/Q192Y | 51.5 |
| 954 | V38E/Y40H/V41Q/L97bG/H99Q/C122S/R217T | 51.6 |
| 870 | V38D/T39Y/Y40Q/V41L/T97aY/L97bA/H99Q/C122S | 51.7 |
| 942 | R35V/R37aE/V38E/Y40Q/V41L/Y60bS/T97aE/L97bA/H99Q/C122S/Y149R | 51.7 |
| 358 | R35S/Y40Q/V41L/Y60bT/T97aE/L97bA/H99Q/C122S/Y149R | 52.4 |
| 535 | F30H/V38D/V41R/L97bA/H99Q/C122S/Y151L/M157T | 52.9 |
| 356 | R35K/Y40Q/V41L/Y60bE/L97bA/H99Q/C122S/Y149R | 53.2 |
| 692 | F30Y/R35V/R36H/H37T/V38E/T39A/Y40L/V41Q/T97aI/L97bA/H99Q/C122S/Y149R/ | 53.7 |
| | M157K | |
| 184 | F30H/V38D/V41R/L97bA/H99Q/C122S/Y151L/M157K/R217D | 54 |
| 249 | F30Y/R36H/V38E/Y40H/V41R/I65T/T97aI/L97bA/H99Q/C122S/Y149R/M157K | 54.1 |
| 672 | R36H/H37S/V38E/T39W/V41R/Y60bN/T97aI/L97bA/H99Q/C122S/Y149R | 54.1 |
| 371 | V38D/V41R/L97bR/C122S/Y151L/R217V | 54.3 |
| 553 | F30Y/R36S/V38D/T39I/Y40H/V41R/L97bA/H99Q/C122S/S146P/M157K/T158S | 54.6 |
| 365 | R35V/R37aE/V38E/Y40Q/V41L/Y60bS/L97bA/H99Q/C122S/Y149R | 54.6 |
| 37 | V38E/Y40Q/V41L/Y60bL/H99Q/C122S | 54.9 |
| 347 | R37aE/Y40Q/V41L/L97bA/H99Q/C122S | 54.9 |
| 709 | F30Y/R35Q/R36H/H37G/R37aE/V38E/T39F/Y40F/V41R/D60aS/Y60bP/T97aE/L97bA/ | 55.3 |
| | H99Q/C122S/Y149R/M157K | |
| 487 | F30H/G37bD/V38D/T39H/V41R/L97bA/H99Q/R110dH/C122S/Y151L/M157K/S240I | 55.5 |
| 902 | R35K/H37A/R37aE/V38H/T39Y/V41R/Y60bK/T97aS/L97bR/H99E/C122S/Y151L/ | 55.9 |
| | E175D/Q192T/R217E/K224R | |
| 603 | F30Y/R36H/H37D/V38E/T39W/Y40H/V41R/Y60bN/T97aV/L97bA/H99Q/C122S/ | 56 |
| | Y149R/M157K | |
| 25 | R35Q/H37Y/R37aE/T39Y/V41R/D60aP/Y60bQ/T97aI/L97bA/H99Q/C122S/Y149R | 56.2 |
| 436 | V38D/V41R/A96D/D97G/A98G/T97adel/H99L/L97bdel/C122S/Y151L/Q192E/R217D | 56.3 |
| 606 | F30Y/R36H/H37E/V38E/T39F/Y40H/V41R/Y60bN/T97aV/L97bA/H99Q/C122S/ | 56.4 |
| | Y149R/M157K | |
| 337 | H37G/R37aD/G37bD/V38F/T39H/V41R/Y60bK/T97aS/L97bR/H99E/C122S/Y151L/ | 56.4 |
| | E175D/Q192T/R217E | |
| 587 | F30Y/R36H/V38E/Y40H/V41R/K61E/T97aI/L97bA/H99Q/C122S/Y149H/M157K/ | 57.7 |
| | K187R | |
| 232 | F30Y/R36H/V38E/Y40H/V41R/K61E/T97aI/L97bA/H99Q/C122S/Y149R/M157K | 58 |
| 44 | T39Y/V41R/D60aP/L97bA/H99Q/C122S | 58.2 |
| 329 | H37G/R37aD/G37bD/V38F/T39H/V41R/T97aS/L97bR/H99E/C122S/Y151L/E175D/ | 58.5 |
| | Q192T/R217E/K224R | |
| 216 | I17V/F30Y/R35Q/H37W/V38D/Y40H/V41R/Y60bN/L97bA/H99Q/C122S/Y149H/ | 58.6 |
| | M157K | |
| 519 | F30Y/R35Q/V38D/Y40H/V41R/L97bA/H99Q/C122S/Y149W/M157K/R217D | 58.8 |
| 270 | F30Y/R36H/V38E/Y40H/V41R/T97aE/L97bA/H99Q/C122S/M157K | 59.3 |
| 348 | R37aE/Y40Q/V41L/L97bA/H99Q/C122S/Y149R | 59.3 |
| 793 | R35N/H37S/R37aE/V38E/T39F/V41R/D60aP/Y60bE/T97aI/L97bA/H99Q/C122S/ | 59.5 |
| | Y149R | |
| 226 | F30Y/R36H/V38E/Y40H/V41R/T97aI/L97bA/H99Q/C122S/Y149R/M157K | 59.9 |
| 719 | F30Y/R35Q/R36H/H37G/R37aL/V38E/T39N/Y40F/V41R/D60aP/Y60bT/T97aE/L97bA/ | 59.9 |
| | H99Q/C122S/Y149R/M157K | |
| 625 | F30Y/R35V/R36H/H37G/V38E/T39L/Y40H/V41R/Y60bT/T97aI/L97bA/H99Q/C122S/ | 60.1 |
| | Y149R/M157K/Q192T/R239H | |
| 903 | R35Q/H37G/R37aE/V38Y/T39F/V41R/Y60bK/T97aS/L97bR/H99E/C122S/Y151L/ | 60.1 |
| | E175D/Q192T/R217E/K224R | |
| 35 | V38E/Y40Q/Y60bL/L97bA/H99Q/C122S | 60.2 |
| 176 | F30H/V38D/V41R/L97bA/H99Q/C122S/Y149N/Y151L/M157K | 60.3 |
| 381 | H99Q/C122S/Y151L/R217V | 60.4 |
| 841 | R35S/V38D/Y40H/V41L/Y60bD/L97bG/H99Q/C122S | 61.5 |
| 698 | R35F/H37D/R37aS/V38E/T39Y/V41R/D60aE/Y60bD/T97aI/L97bA/H99Q/C122S/ | 63.4 |
| | Y149R | |
| 935 | R35V/R37aD/V38E/Y40Q/V41L/Y60bG/T97aE/L97bA/H99Q/C122S/Y149R | 63.5 |
| 951 | R36L/V38E/Y40Q/V41R/L97bG/H99Q/C122S/Y151P/R217S | 63.7 |
| 600 | F30Y/R36H/H37D/V38E/T39W/Y40H/V41R/Y60bV/T97aE/L97bA/H99Q/C122S/ | 63.9 |
| | Y149R/M157K | |
| 607 | F30Y/R36H/H37G/V38E/T39Y/Y40H/V41R/Y60bN/T97aA/L97bA/H99Q/C122S/ | 64.2 |
| | Y149R/M157K | |
| 947 | R37aD/V38E/Y40Q/V41L/Y60bP/T97aV/L97bA/H99Q/C122S/Y149K | 64.8 |
| 555 | F30Y/R35L/V38D/Y40H/V41R/L97bA/H99Q/C122S/M157K | 65.1 |
| 357 | R37aD/Y40Q/V41L/Y60bT/T97aE/L97bA/H99Q/C122S/Y149R | 65.3 |
| 699 | R35A/H37D/R37aN/V38E/T39F/V41R/D60aP/Y60bD/T97aI/L97bA/H99Q/C122S/ | 65.8 |
| | Y149R | |
| 198 | I17V/F30Y/V38D/Y40H/V41R/L97bA/H99Q/C122S/M157K | 66 |
| 267 | V38E/Y40Q/V41Q/D60aP/Y60bL/L97bA/H99Q/C122S/Y149W | 66 |
| 711 | F30Y/R35Q/R36H/H37G/R37aN/V38E/T39Y/Y40F/V41R/Y60bA/T97aE/L97bA/ | 66.2 |
| | H99Q/C122S/Y149R/M157K | |
| 849 | V38D/V41R/Y60bR/L97bR/H99E/C122S/Y151L/E175D/Q192T/R217E/K224R | 66.2 |
| 518 | F30H/R35Q/V38D/V41R/Y60bE/L97bA/H99Q/C122S/Y149N/Y151L/M157K | 66.3 |
| 313 | V38D/T39L/V41R/T97aI/L97bA/H99Q/C122S | 66.3 |
| 937 | R37aP/V38E/Y40Q/V41L/Y60bE/L97bA/H99Q/C122S/Y149R | 67.2 |
| 591 | F30Y/R36H/H37S/V38E/T39L/Y40H/V41R/Y60bH/T97aI/L97bA/H99Q/C122S/Y149R/ | 67.5 |
| | M157K | |
| 901 | R35Q/H37G/R37aE/V38Y/T39H/V41R/Y60bK/T97aS/L97bR/H99E/C122S/Y151L/ | 67.6 |
| | E175D/Q192T/R217E/K224R | |
| 955 | V38E/Y40H/V41T/L97bG/H99Q/C122S/R217T | 67.8 |
| 833 | V38D/V41Q/L97bG/H99Q/C122S/Y151L/R217T | 68.6 |
| 417 | V38D/V41R/A96D/D97G/A98G/T97adel/H99L/L97bdel/C122S/R217D | 68.8 |
| 695 | F30Y/R35Q/R36H/H37G/R37aE/V38E/T39I/Y40F/V41R/D60aP/Y60bD/T97aI/L97bA/ | 69.2 |
| | H99Q/C122S/Y149M/M157K | |
| 893 | R35G/H37T/R37aE/V38T/T39Y/V41Q/Y60bR/T97aF/L97bR/H99E/C122S/Y151L/ | 69.7 |
| | E175D/Q192T/R217E/K224R | |
| 932 | R37aS/V38D/T39Y/V41R/L97bI/H99E/C122S/R217T | 70.1 |
| 233 | F30Y/R36H/R37aH/V38E/Y40H/V41R/K61E/T97aI/L97bA/H99Q/C122S/Y149R/ | 70.3 |
| | M157K | |
| 661 | F30H/R35L/R36H/H37E/V38E/T39F/Y40F/V41R/T97aI/L97bA/H99Q/C122S/Y149R/ | 70.4 |
| | M157K | |
| 629 | F30Y/R35W/R36H/H37E/V38E/T39Y/Y40H/V41R/Y60bD/T97aI/L97bA/H99Q/C122S/ | 70.8 |
| | Y149R/M157K/Q192M | |
| 807 | V38E/T39L/V41R/D60aP/Y60bD/T97aI/L97bA/H99Q/C122S/Y149V/Y151L/Q192T | 71.1 |
| 199 | F30Y/V38D/Y40H/V41R/L97bA/H99Q/C122S/Y149W/M157K | 71.3 |
| 725 | F30Y/R35F/R36H/H37D/R37aD/V38E/T39H/Y40F/V41R/D60aP/Y60bA/T97aE/L97bA/ | 71.3 |
| | H99Q/C122S/Y149R/M157K | |
| 565 | F30H/R35Q/H37Y/V38D/V41R/D60aE/Y60bN/L97bA/H99Q/C122S/Y149R/Y151L/ | 71.4 |
| | M157K | |
| 376 | L97bR/H99Q/C122S/Y151L/R217V | 72.3 |
| 960 | R37aS/V38E/Y40H/V41T/L97bG/H99Q/C122S/R217T | 72.6 |
| 307 | Y40Q/Y60bL/L97bA/H99Q/C122S | 73 |
| 466 | R36H/G37cD/V38D/V41R/A96D/D97G/A98G/T97adel/H99L/L97bdel/C122S/M157T/ | 75 |
| | R217D | |
| 839 | R35K/V38D/Y40H/V41R/Y60bS/L97bG/H99Q/C122S | 75.6 |
| 299 | R35Q/H37Y/R37aE/V38D/T39Y/V41R/D60aP/Y60bQ/T97aI/L97bA/H99Q/C122S/ | 77.3 |
| | Y149R | |
| 592 | F30Y/R35L/R36H/H37D/V38E/T39W/Y40H/V41R/Y60bA/T97aD/L97bA/H99Q/ | 77.9 |
| | C122S/Y149R/M157K | |
| 520 | F30Y/R35Q/H37W/V38D/Y40H/V41R/Y60bN/L97bA/H99Q/C122S/Y149H/M157K | 78.3 |
| 389 | Y40H/V41Q/L97bG/H99Q/C122S | 78.4 |
| 400 | T39H/V41R/L97bG/H99Q/C122S | 78.4 |
| 315 | V38D/T39L/Y40L/V41R/L97bA/H99Q/C122S | 79 |
| 740 | R35Q/H37G/R37aE/V38E/T39H/V41R/D60aP/Y60bA/T97aI/L97bA/H99Q/C122S/ | 80.1 |
| | Y149R | |
| 716 | F30Y/R35A/R36H/H37T/R37aD/V38E/T39Y/Y40L/V41R/D60aP/Y60bE/T97aE/L97bA/ | 80.7 |
| | H99Q/C122S/Y149R/M157K | |
| 700 | R35Q/H37D/R37aA/V38E/T39F/V41R/D60aP/Y60bE/T97aI/L97bA/H99Q/C122S/ | 80.7 |
| | Y149R | |
| 312 | V38D/Y40L/V41R/T97aI/L97bA/H99Q/C122S | 80.7 |
| 651 | F30Y/R35L/R36H/H37D/V38E/T39Y/Y40F/V41R/T97aI/L97bA/H99Q/C122S/Y149R/ | 80.9 |
| | M157K/Q192N | |
| 871 | R37aS/V38D/T39Y/Y40M/V41R/T97aL/L97bA/H99Q/C122S | 81.2 |
| 374 | R35V/R37aE/Y40Q/V41L/Y60bS/T97aE/L97bA/H99Q/C122S/Y149R | 81.4 |
| 359 | R37aE/Y40Q/V41L/Y60bS/T97aE/L97bA/H99Q/C122S/Y149R | 81.5 |
| 938 | R35M/R37aQ/V38E/Y40Q/V41L/Y60bE/T97aE/L97bA/H99Q/C122S/Y149R | 81.6 |
| 38 | V38E/Y40Q/V41L/Y60bL/L97bA/C122S | 82.9 |
| 243 | F30Y/R36H/V38E/Y40L/V41R/T97aI/L97bA/H99Q/C122S/M157K | 83.5 |
| 500 | F30Y/R35H/V38D/T39S/Y40L/V41R/L97bA/H99Q/C122S/T147S/M157K | 84.7 |
| 564 | F30H/V38D/V41R/L97bA/H99Q/C122S/Y151L/M157K/Q192H/R239H | 85.7 |
| 721 | F30Y/R36H/H37M/R37aD/V38E/T39G/Y40F/V41R/D60aP/Y60bE/T97aE/L97bA/ | 85.9 |
| | H99Q/C122S/Y149R/M157K | |
| 523 | F30Y/R35H/V38D/Y40H/V41R/L97bA/H99Q/C122S/M157K | 87.3 |
| 544 | F30Y/V38D/Y40L/V41Q/L97bA/H99Q/C122S/Y151L/M157R/Q192Y | 88.1 |
| 228 | F30Y/R35Q/H37W/V38D/Y40H/V41R/Y60bN/L97bA/H99Q/C122S/Y149R/M157K | 88.8 |
| 826 | V38D/V41Q/Y60bR/T97aW/L97bR/H99E/C122S/Y151L/E175D/Q192T/R217E/K224R | 90 |
| 985 | R37aH/V38E/T39Y/V41R/D60aP/Y60bQ/L97bA/H99Q/C122S | 90.7 |
| 547 | F30H/V38D/V41Q/L97bA/H99Q/C122S/Y151L/M157R | 91.3 |
| 886 | V38D/T39Y/Y40L/V41K/L97bR/H99L/C122S/E175D | 91.8 |
| 944 | R37aD/V38E/Y40Q/V41L/Y60bP/T97aE/L97bA/H99Q/C122S/Y149R | 91.9 |
| 32 | R35Q/H37Y/R37aE/V38E/T39Y/V41R/D60aP/Y60bQ/T97aI/L97bA/C122S/Y149R | 92.3 |
| 542 | N26D/F30Y/V38D/Y40H/V41R/I65T/L97bA/H99Q/C122S/M126I/M157K | 93.2 |
| 946 | R35A/R37aD/V38E/Y40Q/V41L/Y60bV/T97aE/L97bA/H99Q/C122S/Y149K | 93.4 |
| 939 | R35S/R37aD/V38E/Y40Q/V41L/Y60bT/T97aE/L97bA/H99Q/C122S/Y149R | 93.5 |
| 508 | F30H/R35Q/H37T/V38D/V41R/L97bA/H99Q/C122S/Y149I/Y151L/M157K/R217D | 93.6 |
| 541 | F30H/V38D/L97bA/H99Q/C122S/Y151L/M157K | 94.2 |
| 377 | V38D/H99Q/C122S/Y151L/R217V | 94.4 |
| 576 | F30Y/R35T/H37T/V38D/Y40H/V41R/D60aP/Y60bD/L97bA/H99Q/C122S/Y149T/ | 94.7 |
| | M157K | |
| 227 | I17V/F30Y/V38D/Y40H/V41R/L97bA/H99Q/C122S/Y149R/M157K | 94.8 |
| 855 | V38D/V41R/Y60bR/L97bR/H99L/C122S/Y151L/E175D/Q192Y/R217E/K224R | 94.9 |
| 372 | R37aE/V38E/Y40Q/V41L/Y60bS/T97aE/L97bA/H99Q/C122S/Y149R | 95 |
| 594 | F30Y/R36H/H37E/V38E/T39Y/Y40H/V41R/Y60bN/T97aV/L97bA/H99Q/C122S/ | 96.3 |
| | Y149K/M157K | |
| 820 | V38D/V41Q/D60aP/Y60bS/T97aS/L97bR/H99E/C122S/Y151L/E175D/Q192Y/R217E/ | 96.4 |
| | K224R | |
| 510 | F30H/R35Q/H37Q/V38D/V41R/A96D/L97bA/H99Q/C122S/Y149L/Y151L/M157K/ | 96.8 |
| | R217D | |
| 240 | F30Y/R35Q/H37Y/V38D/Y40H/V41R/Y60bE/L97bA/H99Q/C122S/Y149R/M157K | 98.7 |
| 891 | H37A/R37aE/V38F/T39L/V41Q/Y60bR/T97aW/L97bR/H99E/C122S/Y151L/E175D/ | 99.6 |
| | Q192T/R217E/K224R | |
| 605 | F30Y/R36H/V38E/T39V/Y40H/V41R/Y60bH/T97aE/L97bA/H99Q/C122S/Y149S/ | 99.7 |
| | M157K | |
| 485 | F30Y/V38D/Y40H/V41R/L97bA/H99Q/C122S | 99.9 |
| 622 | F30Y/R35V/R36H/H37S/V38E/T39F/Y40H/V41R/Y60bS/T97aI/L97bA/H99Q/C122S/ | 100 |
| | Y149R/M157K/Q192T | |
| 585 | F30Y/R36H/V38E/Y40H/V41R/Y60bN/N87D/A96T/T97aI/L97bA/H99Q/C122S/N145S/ | 101 |
| | M157K/M207K | |
| 309 | V38E/Y40Q/V41L/L97bA/C122S | 101 |
| 952 | R37aS/V38E/V41R/L97bG/H99Q/C122S/R217V | 101 |
| 445 | R36H/V38D/Y40L/V41K/D97E/A98G/T97adel/H99L/L97bdel/C122S/Y151L/Q192T/ | 102 |
| | R217D | |
| 649 | F30Y/R35Q/R36H/H37G/V38E/T39H/Y40F/V41R/T97aI/L97bA/H99Q/C122S/Y149R/ | 102 |
| | M157K/Q192M | |
| 363 | R35V/R37aE/Y40Q/Y60bS/T97aE/L97bA/H99Q/C122S/Y149R | 103 |
| 314 | V38D/T39L/Y40L/T97aI/L97bA/H99Q/C122S | 104 |
| 183 | F30Y/V38D/Y40H/V41R/L97bA/H99Q/C122S/M157K/R217E | 105 |
| 655 | F30L/R35L/R36H/H37D/V38E/T39Y/V41K/T97aI/L97bA/H99Q/C122S/Y149R/M157K | 105 |
| 921 | R36S/V38D/T39A/Y40F/V41R/L97bA/H99E/C122S/R217T | 105 |
| 568 | F30Y/R35K/H37E/V38D/Y40H/V41R/D60aP/Y60bD/L97bA/H99Q/C122S/Y149N/ | 106 |
| | M157K | |
| 691 | F30Y/R35L/R36H/H37E/V38E/T39S/Y40F/V41R/T97aI/L97bA/H99Q/C122S/Y149R/ | 106 |
| | M157K | |
| 739 | R35Q/H37T/R37aP/V38E/T39Y/V41R/D60aE/Y60bD/T97aI/L97bA/H99Q/C122S/ | 106 |
| | Y149R | |
| 448 | R36H/V38D/Y40I/V41K/D97E/A98G/T97adel/H99L/L97bdel/C122S/Q192A/R217D | 107 |
| 540 | F30Y/R36H/V38D/Y40H/V41R/L97bA/H99Q/C122S/M157K/T210S | 107 |
| 397 | T39Y/V41R/Y60bQ/L97bA/C122S | 108 |
| 208 | F30Y/R35Q/H37T/V38D/Y40H/V41R/L97bA/H99Q/C122S/Y149W/M157K | 109 |
| 211 | F30Y/V38D/Y40H/V41R/T56A/L97bA/H99Q/C122S/M157K | 109 |
| 546 | F30Y/R36S/V38D/Y40H/V41R/L97bA/H99Q/C122S/M157K | 109 |
| 850 | V38D/V41R/D60aP/Y60bD/T97aW/L97bR/H99Q/C122S/Y151L/E175D/Q192A/R217E/ | 109 |
| | K224R | |
| 842 | V38D/V41R/Y60bN/T97aL/L97bR/H99E/C122S/Y151L/E175D/Q192T/R217E/K224R | 109 |
| 883 | R35H/V38D/V41Q/L97bR/H99Q/C122S/Y151L/R217V | 109 |
| 967 | R35H/V38E/L97bR/C122S/Y151L/R217V | 109 |
| 447 | R36H/V38D/V41R/D97E/A98G/T97adel/H99L/L97bdel/C122S/Y151L/Q192G/R217D | 110 |
| 254 | F30Y/R35W/R36H/H37E/V38E/T39W/Y40H/V41R/Y60bH/T97aI/L97bA/H99Q/C122S/ | 111 |
| | Y149R/M157K/Q192A | |
| 385 | R37aS/V41R/L97bG/H99Q/C122S/R217V | 111 |
| 887 | R35Q/H37G/R37aN/V38F/T39H/V41Q/Y60bR/T97aL/L97bR/H99E/C122S/Y151L/ | 112 |
| | E175D/Q192T/R217E/K224R | |
| 164 | R36S/V38D/V41R/A96D/D97G/A98G/T97adel/H99L/L97bdel/C122S/M157K/R217D | 113 |
| 210 | F30Y/R35Q/H37T/V38D/Y40H/V41R/L97bA/H99Q/C122S/M157K | 113 |
| 838 | R35S/V38D/Y40Q/V41R/Y60bS/L97bG/H99Q/C122S | 113 |
| 898 | H37S/R37aD/V38H/T39L/V41Q/Y60bR/T97aW/L97bR/H99E/C122S/Y151L/E175D/ | 113 |
| | Q192T/R217E/K224R | |
| 196 | F30Y/V38D/Y40H/V41R/L97bA/H99Q/C122S/Y149F/M157K | 114 |
| 310 | Y40Q/L97bA/H99Q/C122S | 114 |
| 355 | R37aE/Y40Q/V41L/Y60bE/L97bA/H99Q/C122S/Y149R | 114 |
| 945 | R35S/R37aD/V38E/Y40Q/V41L/T97aD/L97bA/H99Q/C122S/Y149K | 115 |
| 643 | R35Q/H37M/V38D/T39V/V41R/Y60bP/L97bA/H99Q/C122S/Y149R | 116 |
| 644 | R35L/H37E/V38D/T39Y/V41R/L97bA/H99Q/C122S/Y149R | 116 |
| 450 | R36H/V38D/Y40L/V41R/D97E/A98G/T97adel/H99L/L97bdel/C122S/Y151L/Q192D/ | 118 |
| | R217D | |
| 497 | F30Y/Y34N/V38D/Y40H/V41R/Y94F/S95R/L97bA/H99Q/C122S/M157K/T242I | 118 |
| 323 | R37aD/G37bD/V38F/T39H/V41R/Y60bK/T97aS/L97bR/H99E/C122S/Y151L/E175D/ | 118 |
| | Q192T/R217E/K224R | |
| 334 | H37G/R37aD/G37bD/V38F/T39H/V41R/Y60bK/T97aS/L97bR/H99E/C122S/Y151L/ | 118 |
| | Q192T/R217E/K224R | |
| 392 | Y40H/V41T/L97bG/H99Q/C122S | 118 |
| 8 | F30Y/V38D/Y40H/V41R/L97bA/H99Q/C122S/M157K | 119 |
| 434 | R37aH/V38D/V41R/A96D/D97G/A98G/T97adel/H99L/L97bdel/C122S/Y151L/Q192G/ | 119 |
| | R217D | |
| 419 | R36H/V38D/V41M/D97E/A98G/T97adel/H99L/L97bdel/C122S/R217D | 120 |
| 317 | V38D/L97bR/H99Q/C122S/Y151L/R217V | 120 |
| 201 | F30Y/R35Q/V38D/Y40H/V41R/L97bA/H99Q/C122S/Y149W/M157K | 121 |
| 549 | F30Y/R37aH/V38D/Y40H/V41R/K61E/L97bA/H99Q/C122S/M157K | 121 |
| 767 | V38D/L97bR/H99E/C122S/E175D/K224S | 121 |
| 888 | H37N/R37aD/V38Y/T39F/V41Q/Y60bR/T97aW/L97bR/H99E/C122S/Y151L/E175D/ | 121 |
| | Q192T/R217E/K224R | |
| 452 | R36H/V38D/Y40L/V41R/D97E/A98G/T97adel/H99L/L97bdel/C122S/Y151L/Q192R/ | 122 |
| | R217D | |
| 560 | F30Y/R37aS/V38D/Y40H/V41R/L97bA/H99Q/C122S/M157K | 122 |
| 837 | V38D/V41R/L97bG/H99Q/C122S/Y151L/Q192S/R217A | 122 |
| 361 | R37aD/Y40Q/V41L/Y60bE/L97bA/H99Q/C122S/Y149R | 122 |
| 880 | R35S/V38D/V41T/L97bR/H99Q/C122S/Y151L/R217E | 124 |
| 40 | Y40Q/V41L/L97bA/C122S | 124 |
| 173 | F30H/V38D/V41R/L97bV/H99Q/C122S/Y151L/M157K | 125 |
| 229 | F30Y/V38D/Y40H/V41R/L97bA/H99Q/C122S/Y149R/M157K | 125 |
| 322 | V38D/V41R/L97bR/H99Q/C122S/Y151L | 125 |
| 895 | H37A/R37aE/V38Y/T39Y/V41Q/Y60bR/T97aV/L97bR/H99E/C122S/Y151L/E175D/ | 126 |
| | Q192T/R217E/K224R | |
| 892 | H37N/R37aE/V38F/T39L/V41Q/Y60bR/T97aW/L97bR/H99E/C122S/Y151L/E175D/ | 127 |
| | Q192T/R217E/K224R | |
| 652 | F30Y/R35L/R36H/H37E/V38E/T39L/Y40F/V41R/T97aI/L97bA/H99Q/C122S/Y149R/ | 129 |
| | M157K/Q192H | |
| 451 | R36H/V38D/Y40L/V41R/D97E/A98G/T97adel/H99L/L97bdel/C122S/Y151M/Q192T/ | 130 |
| | R217D | |
| 854 | V38D/V41R/Y60bR/L97bR/H99L/C122S/Y151L/E175D/Q192T/R217E/K224R | 130 |
| 308 | V38E/Y40Q/L97bA/H99Q/C122S | 133 |
| 968 | V38E/T56I/H99Q/C122S/Y151L/S190G/R217V | 134 |
| 556 | F30Y/S37dP/V38D/Y40H/V41R/L97bA/H99Q/C122S/M157K | 135 |
| 964 | R35S/V38E/L97bR/C122S/Y151L/R217V/H241N | 135 |
| 396 | T39Y/V41R/L97bA/C122S | 135 |
| 384 | L97bR/C122S/Y151L/R217V | 136 |
| 599 | F30Y/R35L/R36H/H37E/V38E/T39L/Y40H/V41R/Y60bS/T97aD/L97bA/H99Q/C122S/ | 137 |
| | Y149R/M157K | |
| 596 | F30Y/R36H/H37E/V38E/T39W/Y40H/V41R/Y60bD/T97aD/L97bA/H99Q/C122S/ | 137 |
| | Y149R/M157K | |
| 894 | R35K/H37S/R37aE/V38F/T39Y/V41Q/Y60bR/T97aL/L97bR/H99E/C122S/Y151L/ | 141 |
| | E175D/Q192T/R217E/K224R | |
| 269 | F30Y/R35W/R36H/H37E/V38E/T39W/Y40H/V41R/Y60bQ/T97aE/L97bA/H99L/ | 142 |
| | C122S/Y149K/M157K | |
| 840 | R35Q/V38D/Y40L/V41L/Y60bP/L97bG/H99Q/C122S | 142 |
| 471 | F30H/V38D/V41R/L97bA/H99Q/C122S/M157E | 146 |
| 429 | V38D/V41R/A96D/D97G/A98G/T97adel/H99L/L97bdel/C122S/Y151L/Q192D/R217D | 146 |
| 501 | F30Y/R36S/V38H/Y40L/V41R/N76K/L97bA/H99Q/C122S/M157K | 146 |
| 195 | F30Y/V38D/Y40H/V41R/L97bA/H99Q/C122S/Y149L/M157K | 147 |
| 539 | F30H/V38D/Y40F/V41R/L97bA/H99Q/C122S/Y151L/M157R/Q192H | 149 |
| 927 | R37aP/V38D/T39L/Y40I/V41R/H99L/C122S/R217Q | 150 |
| 293 | V38E/V41R/T97aI/L97bA/H99Q/C122S | 152 |
| 375 | R35V/R37aE/V38E/Y40Q/Y60bS/T97aE/L97bA/H99Q/C122S/Y149R | 153 |
| 214 | V38D/V41R/L97bA/H99Q/C122S/M157K/T158A | 154 |
| 189 | F30Y/V38D/Y40H/V41R/L97bA/H99Q/C122S/Y149F/M157K/R217E | 155 |
| 31 | R35Q/H37Y/R37aE/V38E/T39Y/V41R/D60aP/Y60bQ/T97aI/H99Q/C122S/Y149R | 155 |
| 393 | V41R/L97bG/H99Q/C122S | 155 |
| 890 | R35K/H37G/R37aE/G37bS/V38F/T39H/V41Q/Y60bR/T97aW/L97bR/H99E/C122S/ | 156 |
| | Y151L/E175D/Q192T/R217E/K224R | |
| 571 | F30Y/R35S/H37G/V38D/Y40H/V41R/D60aP/Y60bE/L97bA/H99Q/C122S/Y149K/ | 158 |
| | M157K | |
| 602 | F30Y/R36H/H37D/V38E/T39Y/Y40H/V41R/Y60bM/T97aD/L97bA/H99Q/C122S/ | 159 |
| | Y149R/M157K | |
| 203 | F30Y/R35Q/V38D/Y40H/V41R/L97bA/H99Q/C122S/M157K | 160 |
| 843 | V38D/V41Q/Y60bR/T97aF/L97bR/H99Q/C122S/Y151L/E175D/Q192H/R217E/K224R | 160 |
| 897 | H37A/R37aD/V38Y/T39Y/V41Q/Y60bR/T97aD/L97bR/H99E/C122S/Y151L/E175D/ | 160 |
| | Q192T/R217E/K224R | |
| 896 | H37D/R37aD/V38Y/T39Y/V41Q/Y60bR/T97aL/L97bR/H99E/C122S/Y151L/E175D/ | 162 |
| | Q192T/R217E/K224R | |
| 353 | Y40Q/V41L/L97bA/C122S/Y149R | 162 |
| 488 | F30H/V38D/V41R/L97bA/H99Q/C122S/Y149N/Y151L/M157K/R239H | 163 |
| 930 | R36S/V38D/T39S/V41R/L97bI/H99E/C122S/R217T | 163 |
| 906 | V38D/T39V/V41R/L97bV/H99E/C122S/R217E | 165 |
| 962 | R37aS/V38E/Y40Q/V41L/L97bG/C122S/Y151P/R217T | 166 |
| 484 | F30H/V38D/V41R/L97bA/H99Q/C122S/Y151L/M157K | 167 |
| 378 | V38D/L97bR/C122S/Y151L/R217V | 170 |
| 593 | F30Y/R36H/H37P/V38E/T39Y/Y40H/V41R/Y60bN/L97bA/H99Q/C122S/Y149R/ | 171 |
| | M157K | |
| 825 | V38D/V41K/D60aN/Y60bN/L97bR/H99E/C122S/Y151L/E175D/Q192H/R217E/K224R | 172 |
| 889 | H37A/R37aE/V38F/T39L/V41Q/Y60bR/T97aF/L97bR/H99E/C122S/Y151L/E175D/ | 174 |
| | Q192T/R217E/K224R | |
| 345 | Y40Q/V41L/H99Q/C122S | 174 |
| 574 | F30Y/R35Q/V38D/Y40H/V41R/Y60bS/L97bA/H99Q/C122S/Y149R/M157K/R217E | 175 |
| 730 | F30Y/R36H/H37D/R37aE/V38E/T39Y/Y40F/V41R/Y60bN/T97aE/L97bA/H99Q/ | 176 |
| | C122S/Y149R/M157K | |
| 941 | R35K/R37aD/V38E/Y40Q/V41L/Y60bE/L97bA/H99Q/C122S/Y149R | 178 |
| 209 | F30Y/R35Q/H37T/V38D/Y40H/V41R/L97bA/H99Q/C122S/Y149F/M157K | 179 |
| 321 | V38D/T39L/Y40L/V41R/T97aI/L97bA/C122S | 179 |
| 245 | N26D/F30Y/R36H/R37aH/V38E/Y40H/V41R/K61E/I65T/L97bA/H99Q/C122S/M126I/ | 185 |
| | M157K | |
| 367 | R35V/R37aE/V38E/Y40Q/V41L/Y60bS/T97aE/L97bA/C122S/Y149R | 185 |
| 483 | F30Y/V38D/Y40M/V41R/L97bA/H99Q/C122S | 188 |
| 768 | V38D/L97bV/H99E/C122S/K224S | 192 |
| 861 | V38D/V41R/D60aQ/Y60bP/L97bG/H99Q/C122S | 192 |
| 202 | F30Y/R35Q/V38D/Y40H/V41R/L97bA/H99Q/C122S/Y149F/M157K | 194 |
| 931 | R37aS/V38D/T39G/V41R/L97bM/H99E/C122S/R217S | 194 |
| 521 | F30Y/R35Q/H37T/V38D/Y40H/V41R/L97bA/H99Q/C122S/Y149I/M157K | 196 |
| 473 | F30Y/V38D/Y40H/V41A/L97bA/H99Q/C122S/M157R | 197 |
| 191 | F30Y/R35Q/V38D/Y40H/V41R/L97bA/H99Q/C122S/Y149L/M157K/R217E | 199 |
| 206 | F30Y/H37T/V38D/Y40H/V41R/L97bA/H99Q/C122S/M157K | 199 |
| 327 | H37G/R37aD/G37bD/V38F/V41R/Y60bK/T97aS/L97bR/H99E/C122S/Y151L/E175D/ | 199 |
| | Q192T/R217E/K224R | |
| 41 | R37aS/V41R/L97bG/H99Q/C122S | 199 |
| 244 | F30Y/R36H/V38E/Y40H/V41R/T97aI/L97bA/H99Q/C122S/M157K/Q192H | 201 |
| 248 | N26D/F30Y/V38D/Y40H/V41R/I65T/L97bA/H99Q/C122S/M126I/Y149R/M157K | 201 |
| 864 | R35K/V38D/Y40H/Y60bP/L97bG/H99Q/C122S | 201 |
| 525 | F30Y/R35Q/V38D/Y40H/V41R/L97bA/H99Q/C122S/E153D/M157K | 202 |
| 526 | F30Y/V38D/Y40H/V41R/L97bA/H99Q/C122S/D148N/M157K/T188S | 202 |
| 660 | R35E/R36H/H37D/V38E/T39W/Y40F/V41R/T97aI/L97bA/H99Q/C122S/Y149R/ | 202 |
| | M157K/Q192T | |
| 558 | F30Y/R37aS/V38D/Y40H/V41R/E86D/L97bA/H99Q/C122S/M157K/F234Y | 203 |
| 723 | F30Y/R35Q/R36H/H37D/R37aE/V38E/T39Y/Y40F/V41R/D60aE/Y60bG/T97aE/L97bA/ | 203 |
| | H99Q/C122S/Y149R/M157K | |
| 563 | F30Y/R37aS/V38D/Y40H/V41R/L97bA/H99Q/C122S/M157K/K187Q/T208S | 205 |
| 465 | R36H/V38D/V41R/A96D/D97G/T97aN/A98G/L97bdel/H99L/C122S/Q192R/R217F | 208 |
| 170 | F30Y/V38D/Y40H/V41R/L97bA/H99Q/C122S/M157K/R217D | 208 |
| 583 | F30Y/R35T/H37T/V38D/Y40H/V41R/D60aT/Y60bS/L97bA/H99Q/C122S/Y149K/ | 208 |
| | M157K | |
| 609 | F30Y/R35L/H37D/V38D/Y40H/V41R/D60aE/Y60bT/L97bA/H99Q/C122S/Y149R/ | 212 |
| | M157K | |
| 352 | R37aE/Y40Q/V41L/L97bA/C122S | 212 |
| 920 | R36S/V38D/T39K/Y40F/V41R/L97bI/H99E/C122S/R217S | 213 |
| 320 | V38D/T39L/Y40L/V41K/L97bR/H99L/C122S/E175D | 215 |
| 169 | V38D/V41R/A96E/D97G/A98G/T97adel/H99L/L97bdel/C122S/Y151L/T178S/Q192E/ | 217 |
| | R217D | |
| 588 | F30Y/R37aP/V38D/Y40H/V41R/Y60bN/E84D/L97bA/H99Q/C122S/M157K/T242I | 219 |
| 190 | F30Y/V38D/Y40H/V41R/L97bA/H99Q/C122S/Y149F/M157K/R217D | 222 |
| 566 | F30Y/R35T/H37Q/V38D/Y40H/V41R/D60aE/Y60bN/L97bA/H99Q/C122S/Y149R/ | 230 |
| | M157K | |
| 536 | R37aL/V38D/L97bA/H99Q/C122S/Y151L/M157S | 231 |
| 760 | V38D/L97bR/H99E/C122S/E175D/R217E/K224R | 234 |
| 478 | F30Y/V38D/Y40L/V41R/L97bA/H99Q/C122S/M157R | 235 |
| 238 | F30Y/R35Q/V38D/Y40H/V41R/D60aE/Y60bS/L97bA/H99Q/C122S/Y149T/M157K | 235 |
| 234 | F30Y/R35Q/H37D/V38D/Y40H/V41R/D60aE/Y60bN/L97bA/H99Q/C122S/Y149S/ | 236 |
| | M157K | |
| 207 | F30Y/R35Q/H37T/V38D/Y40H/V41R/L97bA/H99Q/C122S/Y149L/M157K | 238 |
| 344 | Y40Q/V41L/C122S | 238 |
| 554 | F30Y/Y34S/R37aH/V38D/Y40H/V41R/L97bA/H99Q/C122S/Y149F/M157K | 239 |
| 354 | R37aE/Y40Q/V41L/L97bA/C122S/Y149R | 245 |
| 247 | N26D/F30Y/V38D/Y40L/V41R/I65T/L97bA/H99Q/C122S/M126I/M157K | 247 |
| 476 | F30Y/V38D/Y40H/V41N/L97bA/H99Q/C122S | 250 |
| 524 | F30Y/R35H/V38D/Y40H/V41R/T56A/L97bV/H99Q/R116S/C122S/M157K/T210N | 250 |
| 212 | F30Y/V38D/Y40H/V41R/L97bA/H99Q/C122S/Y151F/M157K | 252 |
| 388 | Y40H/V41Q/L97bG/C122S/R217T | 252 |
| 974 | V38E/T39H/D60aP/Y60bK/L97bG/H99Q/C122S | 252 |
| 205 | F30Y/H37T/V38D/Y40H/V41R/L97bA/H99Q/C122S/Y149F/M157K | 255 |
| 167 | V38D/Y40P/V41K/L97bA/H99Q/C122S | 257 |
| 573 | F30Y/R35T/H37A/V38D/Y40H/V41R/D60aP/Y60bE/L97bA/H99Q/C122S/Y149K/ | 263 |
| | M157K/R217Y | |
| 559 | F30Y/R37aH/V38D/Y40H/V41R/L97bA/H99Q/C122S/M157K/S174P | 267 |
| 569 | F30Y/R35L/H37D/V38D/Y40H/V41R/Y60bD/L97bA/H99Q/C122S/Y149R/M157K | 267 |
| 578 | F30Y/R35S/V38D/Y40H/V41R/D60aE/Y60bS/L97bA/H99Q/C122S/Y149R/M157K | 270 |
| 383 | L97bR/H99Q/C122S/Y151L | 271 |
| 572 | F30Y/R35Q/V38D/Y40H/V41R/D60aE/Y60bE/L97bA/H99Q/C122S/Y149N/M157K | 275 |
| 200 | F30Y/R35Q/V38D/Y40H/V41R/L97bA/H99Q/C122S/Y149L/M157K | 276 |
| 250 | F30Y/V38D/Y40L/V41R/L97bA/H99Q/C122S/M157K | 277 |
| 567 | F30Y/R35T/V38D/Y40H/V41R/D60aE/Y60bQ/L97bA/H99Q/C122S/Y149R/M157K/ | 277 |
| | R217K | |
| 477 | F30S/V38D/V41R/L97bA/H99Q/C122S/Y151L/M157K | 279 |
| 819 | V38D/V41Q/D60aK/Y60bD/T97aA/L97bR/H99E/C122S/Y151L/E175D/Q192Y/R217E/ | 279 |
| | K224R | |
| 186 | F30Y/V38D/Y40H/V41R/L97bA/H99Q/C122S/Y149L/M157K/R217E | 280 |
| 976 | V38E/T39H/D60aP/Y60bW/L97bG/H99Q/C122S | 281 |
| 662 | F30H/R35L/R36H/H37D/V38E/T39Y/Y40F/V41Q/T97aI/L97bA/H99Q/C122S/Y149R/ | 284 |
| | M157K | |
| 316 | V38D/T39L/Y40L/V41R/T97aI/H99Q/C122S | 284 |
| 757 | V38D/L97bR/H99Q/C122S/E175D/R217E/K224R | 292 |
| 923 | R37aS/V38D/T39L/Y40L/V41R/L97bM/H99L/C122S/R217S | 292 |
| 654 | F30Y/R36H/V38E/Y40H/V41R/T97aI/L97bA/H99Q/C122S/Y149R/M157K/Q192Y | 297 |
| 637 | R35E/H37D/V38D/T39N/V41R/Y60bN/L97bA/H99Q/C122S/Y149R | 306 |
| 766 | V38D/L97bR/H99E/C122S/E175D/K224A | 306 |
| 763 | V38D/L97bV/H99L/C122S/E175D/K224S | 310 |
| 813 | V38D/L97bR/H99L/C122S/E175D/K224A | 310 |
| 912 | R37aP/V38D/T39Y/V41R/L97bV/H99Q/C122S/R217T | 316 |
| 175 | F30H/V38D/V41R/L97bA/H99Q/C122S/Y151M/M157K | 321 |
| 502 | F30H/V38D/V41R/L73Q/L97bA/H99Q/E110bD/C122S/Y149N/Y151L/M157K | 321 |
| 582 | F30Y/R35Q/V38D/Y40H/V41R/D60aE/Y60bN/L97bA/H99Q/C122S/Y149R/M157K | 324 |
| 817 | V38D/L97bT/H99E/C122S/E175D/K224S | 326 |
| 204 | F30Y/H37T/V38D/Y40H/V41R/L97bA/H99Q/C122S/Y149L/M157K | 330 |
| 522 | F30Y/R35Q/H37T/V38D/Y40H/V41R/D60aE/Y60bN/L97bA/H99Q/C122S/Y149H/ | 331 |
| | M157K | |
| 589 | F30Y/R37aP/G37bD/V38D/Y40H/V41R/Y60bN/L97bA/H99Q/C122S/M157K | 331 |
| 237 | F30Y/R35Q/V38Y/Y40H/V41R/D60aE/Y60bE/L97bA/H99Q/C122S/Y149V/M157K/ | 332 |
| | R217M | |
| 764 | V38D/L97bR/H99L/C122S/E175D/R217E | 333 |
| 235 | F30Y/R35Q/H37T/V38D/Y40H/V41R/D60aE/Y60bN/L97bA/H99Q/C122S/Y149L/ | 338 |
| | M157K | |
| 773 | V38D/L97bG/H99Q/C122S/R217Q | 338 |
| 187 | F30Y/V38D/Y40H/V41R/L97bA/H99Q/C122S/Y149L/M157K/R217D | 341 |
| 933 | R35E/R37aD/V38E/Y40Q/V41L/Y60bN/L97bA/H99Q/C122S/Y149R | 342 |
| 610 | F30Y/R35Q/V38D/Y40H/V41R/D60aK/Y60bV/L97bA/H99Q/C122S/Y149R/M157K | 344 |
| 581 | F30Y/R35Q/V38D/Y40H/V41R/D60aP/Y60bE/L97bA/H99Q/C122S/Y149R/M157K/ | 345 |
| | R217K | |
| 865 | R35Q/V38D/Y40M/V41R/Y60bA/L97bG/H99Q/C122S | 345 |
| 252 | F30Y/R36H/V38E/Y40L/V41R/T97aI/L97bA/H99Q/C122S/M157K/Q192H | 346 |
| 331 | H37G/R37aD/G37bD/V38F/T39H/V41R/Y60bK/T97aS/H99E/C122S/Y151L/E175D/ | 347 |
| | Q192T/R217E/K224R | |
| 26 | R35Q/H37Y/R37aE/V38E/V41R/D60aP/Y60bQ/T97aI/L97bA/H99Q/C122S/Y149R | 348 |
| 866 | R35K/V38D/Y40F/V41R/Y60bT/L97bG/H99Q/C122S | 348 |
| 579 | F30Y/R35H/H37T/V38D/Y40H/V41R/D60aR/Y60bD/L97bA/H99Q/C122S/Y149R/ | 349 |
| | M157K | |
| 774 | F30H/V38D/L97bA/H99Q/C122S/Y151L/M157T/Q192H | 349 |
| 380 | L97bR/H99Q/C122S/Y151L/R217V | 351 |
| 860 | R35S/V38D/V41L/D60aP/Y60bW/L97bG/H99Q/C122S | 353 |
| 391 | Y40H/V41T/L97bG/C122S/R217T | 357 |
| 301 | V38E/V41L/Y60bL/L97bA/H99Q/C122S | 364 |
| 815 | V38D/L97bK/H99L/C122S/E175D/K224A | 365 |
| 302 | L97bG/H99Q/C122S/R217Q | 367 |
| 646 | R35G/H37G/V38D/T39W/V41A/Y60bN/L97bA/H99Q/C122S | 370 |
| 636 | R35F/H37G/V38D/T39H/V41A/Y60bD/L97bA/H99Q/C122S/Y149R | 371 |
| 332 | H37G/R37aD/G37bD/V38F/T39H/V41R/Y60bK/T97aS/L97bR/C122S/Y151L/E175D/ | 371 |
| | Q192T/R217E/K224R | |
| 193 | F30Y/H37D/V38D/Y40H/V41R/L97bA/H99Q/C122S/Y149L/M157K/R217E | 378 |
| 862 | R35Q/V38D/Y40H/V41L/Y60bD/L97bG/H99Q/C122S | 380 |
| 828 | V38D/V41Q/L97bG/H99Q/C122S/Y151L/Q192S/R217A | 385 |
| 965 | R35S/V38E/H99Q/C122S/S146F/Y151L/V159L/K179N/Q192R/R217V/T242S | 408 |
| 590 | F30Y/R35L/R36H/H37P/V38E/Y40H/V41R/Y60bG/T97aD/L97bA/H99Q/C122S/ | 409 |
| | Y149R/M157K | |
| 971 | V38E/T39R/D60aP/Y60bD/L97bG/H99Q/C122S | 412 |
| 846 | R37aS/V38D/V41R/Y60bT/T97aD/L97bR/H99Q/C122S/Y151L/E175D/Q192A/R217E/ | 413 |
| | K224R | |
| 318 | V38D/V41R/L97bR/H99Q/C122S/R217V | 418 |
| 438 | R36H/V38D/Y40F/V41R/D97E/A98G/T97adel/H99L/L97bdel/C122S/Y151L/Q192D/ | 421 |
| | R217D | |
| 537 | F30N/V38D/V41L/L97bA/H99Q/C122S/Y151L/M157R | 428 |
| 899 | H37G/R37aD/V38Y/T39H/V41Q/Y60bR/T97aD/L97bR/H99E/C122S/Y151L/E175D/ | 433 |
| | Q192T/R217E/K224R | |
| 659 | F30Y/R35W/R36H/H37E/V38E/T39S/Y40L/V41R/T97aI/L97bA/H99Q/C122S/Y149R/ | 434 |
| | M157K/Q192A | |
| 844 | V38D/V41R/D60aP/Y60bD/T97aP/L97bR/H99Q/C122S/Y151L/E175D/Q192R/R217E/ | 437 |
| | K224R | |
| 460 | F30Y/R36H/V38D/V41K/D97E/T97adel/A98G/L97bdel/H99L/C122S/R217D | 445 |
| 274 | L97bA/H99Q/C122S | 449 |
| 966 | F30Y/R37aH/V38E/H99Q/C122S/Y151L/R217V | 449 |
| 246 | N26D/F30Y/V38D/Y40H/V41R/I65T/L97bA/H99Q/C122S/M126I/M157K/Q192H | 455 |
| 253 | F30Y/R35W/R36H/H37E/V38E/T39S/Y40H/V41W/Y60bW/T97aI/L97bA/H99Q/ | 463 |
| | C122S/Y149R/M157K/Q192Y | |
| 970 | V38E/T39S/V41L/Y60bP/L97bG/H99Q/C122S | 464 |
| 319 | V38D/Y40L/V41K/L97bR/H99L/C122S/E175D | 466 |
| 236 | F30Y/R35Q/V38D/Y40H/V41R/Y60bE/L97bA/H99Q/C122S/Y149Q/M157K/R217S | 470 |
| 297 | V38D/L97bR/H99E/C122S/E175D/R217E | 470 |
| 343 | V41L/L97bA/H99Q/C122S | 471 |
| 366 | R35V/R37aE/V38E/Y40Q/V41L/Y60bS/T97aE/H99Q/C122S/Y149R | 478 |
| 640 | R35F/H37E/V38D/T39S/V41A/Y60bD/L97bA/H99Q/C122S | 487 |
| 333 | H37G/R37aD/G37bD/V38F/T39H/V41R/Y60bK/T97aS/L97bR/H99E/C122S/E175D/ | 499 |
| | Q192T/R217E/K224R | |
| 213 | V38D/L97bA/H99Q/C122S/M157K/T158A | 503 |
| 256 | F30Y/R35W/R36H/H37E/V38E/T39R/Y40H/V41W/Y60bW/T97aI/L97bA/H99Q/ | 511 |
| | C122S/Y149R/M157K/Q192Y | |
| 529 | F30H/V38D/L97bA/H99Q/C122S/Y151L/M157L/Q192H | 515 |
| 492 | F30Y/R37aH/V38D/Y40L/V41R/L97bA/H99Q/C122S/M157K | 516 |
| 239 | F30Y/R35Q/V38D/Y40H/V41R/D60aE/Y60bE/L97bA/H99Q/C122S/Y149L/M157K/ | 530 |
| | R217S | |
| 814 | V38D/L97bM/H99S/C122S/K224S | 538 |
| 575 | F30Y/R37aD/V38D/Y40L/V41R/L97bA/H99Q/C122S/M126K/M157K | 539 |
| 394 | V41Q/L97bG/H99Q/C122S | 547 |
| 435 | V38D/Y40P/V41R/A96D/D97G/A98G/T97adel/H99L/L97bdel/C122S/Q192L/R217D | 557 |
| 258 | F30Y/R35Y/R36H/H37E/V38E/T39R/Y40H/V41W/Y60bW/T97aI/L97bA/H99Q/C122S/ | 569 |
| | Y149R/M157K/Q192H | |
| 908 | R36S/V38D/T39H/Y40L/V41R/L97bV/H99V/C122S/R217Q | 574 |
| 638 | R35Q/H37Y/V38D/T39A/V41R/Y60bP/L97bA/H99Q/C122S/Y149R/Q192S | 575 |
| 845 | V38D/V41Q/Y60bP/T97aW/L97bR/H99Q/C122S/Y151L/E175D/Q192K/R217E/K224R | 578 |
| 907 | R37aH/V38D/T39M/Y40A/V41K/L97bR/H99Q/C122S/R217E | 582 |
| 328 | H37G/R37aD/G37bD/V38F/T39H/Y60bK/T97aS/L97bR/H99E/C122S/Y151L/E175D/ | 594 |
| | Q192T/R217E/K224R | |
| 811 | V38D/L97bR/H99L/C122S/E175D/R217E/K224R | 610 |
| 848 | R37aS/V38D/V41R/D60aS/Y60bP/L97bR/H99Q/C122S/Y151L/E175D/Q192R/R217E/ | 614 |
| | K224R | |
| 570 | F30Y/R35H/H37T/V38D/Y40H/V41R/D60aE/Y60bD/L97bA/H99Q/C122S/Y149K/ | 622 |
| | M157K/R217K | |
| 295 | V38E/T97aI/L97bA/H99Q/C122S | 630 |
| 499 | F30Y/R35H/V38D/T39S/Y40H/V41R/S75P/L97bA/H99Q/C122S/M157K/I163M/ | 632 |
| | Q204H/K243E | |
| 528 | F30Y/V38D/Y40M/V41R/L97bA/H99Q/C122S/Y151L/M157R/Q192M | 641 |
| 395 | V41T/L97bG/H99Q/C122S | 646 |
| 463 | R36H/V38D/V41M/A55S/D97E/A98G/T97adel/H99L/L97bdel/C122S/R217D | 647 |
| 928 | V38D/T39V/Y40L/V41S/H99V/C122S/R217V | 653 |
| 577 | F30Y/R35H/H37D/V38D/Y40H/V41R/D60aK/Y60bS/L97bA/H99Q/C122S/Y149R/ | 659 |
| | M157K | |
| 759 | V38D/L97bR/H99L/C122S/E175D/R217E/K224S | 661 |
| 769 | V38D/L97bK/H99L/C122S/R217E | 673 |
| 174 | F30H/V38D/V41R/L97bA/H99Q/C122S/Y151F/M157K | 688 |
| 867 | R35Q/V38D/Y40F/V41T/Y60bP/L97bG/H99Q/C122S | 698 |
| 462 | R36H/V38D/V41M/F59I/D97E/T97adel/A98G/L97bdel/H99L/C122S/R217D | 702 |
| 969 | F30Y/V38E/L97bR/C122S/Y151L/R217V | 702 |
| 914 | V38D/T39H/Y40F/V41K/L97bM/H99T/C122S/R217E | 717 |
| 386 | R37aS/V41R/L97bG/C122S/R217V | 726 |
| 379 | V38D/L97bR/H99Q/C122S/R217V | 731 |
| 885 | R37aS/V38D/V41R/L97bR/H99Q/C122S/Y151L/Q192T/R217V | 738 |
| 27 | R35Q/H37Y/R37aE/V38E/T39Y/D60aP/Y60bQ/T97aI/L97bA/H99Q/C122S/Y149R | 743 |
| 362 | R35V/R37aE/V38E/V41L/Y60bS/T97aE/L97bA/H99Q/C122S/Y149R | 765 |
| 241 | F30Y/V38D/Y40H/V41R/L97bA/H99Q/C122S/M157K/Q192H | 778 |
| 527 | F30Y/V38D/Y40H/V41R/L97bA/H99Q/C122S/M157K/K223N/P236S | 781 |
| 255 | F30Y/R35W/R36H/H37E/V38E/T39Q/Y40H/V41W/Y60bW/T97aI/L97bA/H99Q/ | 802 |
| | C122S/Y149R/M157K/Q192F | |
| 490 | F30Y/R37aH/V38D/Y40L/V41R/L97bA/H99Q/R110dH/C122S/M157K/V160I | 808 |
| 630 | F30Y/R35W/R36H/H37E/V38E/T39V/Y40H/V41W/Y60bS/T97aI/L97bA/H99Q/C122S/ | 819 |
| | Y149R/M157K/Q192H | |
| 771 | V38D/L97bV/H99L/C122S/K224A | 824 |
| 444 | R36H/V38D/Y40F/V41R/D97E/A98G/T97adel/H99L/L97bdel/C122S/Y151M/Q192D/ | 825 |
| | R217D | |
| 479 | F30Y/R36H/V38D/Y40F/V41R/L97bA/H99Q/C122S/Y151M/M157Y/Q192A | 830 |
| 812 | V38D/L97bT/H99L/C122S/E175D/R217K | 851 |
| 294 | V38E/T97aE/L97bA/H99Q/C122S | 862 |
| 580 | F30Y/R35Q/V38D/Y40H/V41R/D60aE/Y60bK/L97bA/H99Q/C122S/Y149R/M157K/ | 917 |
| | R217I | |
| 816 | V38D/L97bR/H99V/C122S/E175D/R217E/K224R | 930 |
| 853 | V38D/V41Q/Y60bP/T97aY/L97bR/H99L/C122S/Y151L/E175D/Q192K/R217E/K224R | 960 |
| 922 | R35Q/H37Y/R37aE/V38E/T39Y/V41R/L97bG/H99S/C122S | 989 |
| 852 | V38D/V41Q/D60aN/Y60bP/T97aN/L97bR/H99I/C122S/Y151L/E175D/Q192R/R217E/ | 993 |
| | K224R | |
| 635 | R35Q/H37D/V38D/T39H/V41R/Y60bP/L97bA/H99Q/C122S/Y149R/Q192T | 998 |
| 548 | F30H/V38D/L97bA/H99Q/C122S/Y151F/M157K | 1000 |
| 259 | F30Y/R35Y/R36H/H37E/V38E/T39R/Y40H/V41W/Y60bW/T97aI/L97bA/H99Q/C122S/ | 1030 |
| | Y149R/M157K/Q192F | |
| 847 | V38D/V41K/D60aE/Y60bP/T97aA/L97bR/H99L/C122S/Y151L/E175D/Q192R/R217E/ | 1040 |
| | K224R | |
| 851 | V38D/V41Q/D60aN/Y60bP/L97bR/H99L/C122S/Y151L/E175D/Q192R/R217E/K224R | 1040 |
| 336 | H37G/R37aD/G37bD/V38F/T39H/V41R/Y60bK/T97aS/L97bR/H99E/C122S/Y151L/ | 1040 |
| | E175D/Q192T/K224R | |
| 639 | R35Q/H37Y/V38D/T39F/V41R/Y60bP/L97bA/H99Q/C122S/Y149R/Q192G | 1130 |
| 215 | F30Y/R37aH/V38D/Y40Q/V41I/L97bA/H99Q/C122S/Y151L/M157W/Q192Y | 1140 |
| 631 | F30Y/R35Y/R36H/H37E/V38E/T39A/Y40H/V41W/Y60bV/T97aI/L97bA/H99Q/C122S/ | 1170 |
| | Y149R/M157K/Q192H | |
| 859 | R36H/V38D/T97aR/L97bG/H99Q/C122S/E175F | 1180 |
| 177 | F30H/V38D/V41R/L97bA/H99Q/C122S/Y149N/Y151F/M157K | 1190 |
| 305 | V38D/L97bG/H99Q/C122S | 1190 |
| 909 | R36S/V38D/T39K/Y40F/V41R/L97bN/H99E/C122S/R217S | 1230 |
| 251 | F30Y/V38D/Y40L/V41R/L97bA/H99Q/C122S/M157K/Q192H | 1240 |
| 423 | V38D/L97bA/H99Q/C122S | 1310 |
| 916 | V38D/T39L/Y40L/V41K/L97bH/H99L/C122S/R217A | 1320 |
| 642 | R35Q/H37G/V38D/T39W/V41R/Y60bP/L97bA/H99Q/C122S/Y149R/Q192G | 1340 |
| 929 | R37aS/V38D/T39V/V41E/L97bG/H99Q/C122S/R217T | 1390 |
| 626 | F30Y/R35Y/R36H/H37E/V38E/T39L/Y40H/V41W/Y60bE/T97aI/L97bA/H99Q/C122S/ | 1450 |
| | Y149R/M157K/Q192F | |
| 863 | R37aS/V38D/V41R/D60aT/Y60bN/L97bG/H99Q/C122S | 1450 |
| 805 | V38E/T39W/V41T/D60aP/Y60bW/T97aI/L97bA/H99Q/C122S/Y149L/Y151G/Q192T | 1480 |
| 770 | V38D/L97bR/H99L/C122S/E175D/R217T/K224S | 1570 |
| 808 | V38D/L97bR/H99M/C122S/E175D/R217E | 1570 |
| 424 | R36S/V38D/L97bR/H99E/C122S/R217D/K224R | 1580 |
| 432 | R36H/V38D/V41R/A96D/D97G/T97adel/A98G/L97bdel/H99L/C122S/Y151F/Q192D/ | 1600 |
| | R217D | |
| 809 | V38D/L97bR/H99M/C122S/E175D/R217E/K224R | 1660 |
| 634 | F30Y/R35W/R36H/H37E/V38E/T39V/Y40H/V41W/Y60bA/T97aI/L97bA/H99Q/C122S/ | 1760 |
| | Y149R/M157K/Q192A | |
| 197 | I17L/F30Y/V38D/Y40H/V41R/L97bA/H99Q/C122S/M157K | 1790 |
| 632 | F30Y/R35Y/R36H/H37P/V38E/T39R/Y40H/V41W/Y60bE/T97aI/L97bA/H99Q/C122S/ | 1900 |
| | M157K/Q192F | |
| 810 | V38D/L97bR/C122S/E175D/R217E/K224R | 1990 |
| 761 | V38D/L97bR/H99E/C122S/E175D/R217S/K224S | 2040 |
| 532 | F30H/V38D/Y40H/V41Q/L97bA/H99Q/C122S/Q192H | 2110 |
| 482 | F30Y/V38D/Y40H/V41K/L97bA/H99Q/C122S/Y151R/M157R | 2190 |
| 491 | F30Y/A32E/Y34N/V38D/Y40H/V41R/L97bA/H99Q/C122S/M157K | 2210 |
| 422 | A32S/V38D/H99E/C122S/K224A | 2230 |
| 493 | F30Y/V38D/V41R/L97bA/H99Q/C122S/M157K | 2240 |
| 762 | V38D/L97bR/H99V/C122S/E175D/R217E/K224N | 2240 |
| 533 | F30Q/V38D/Y40L/V41R/L97bA/H99Q/C122S/Y151H/M157R/Q192Y | 2300 |
| 179 | F30H/V38D/V41R/L97bV/H99Q/C122S/Y151F/M157K | 2390 |
| 772 | V38D/L97bR/H99V/C122S/E175D/R217E/K224S | 2490 |
| 756 | V38D/L97bR/H99E/C122S/Y172F/E175D/R217E | 2720 |
| 154 | V38D/T97adel/L97bdel/C122S | 2950 |
| 180 | F30H/V38D/V41R/L97bV/H99Q/C122S/Y149N/Y151F/M157K | 3230 |
| 765 | V38D/L97bG/H99Q/C122S/E175D/R217K/K224A | 3310 |
| 5 | C122S | 3380 |
| 192 | F30Y/R35Q/V38D/Y40H/V41R/L97bA/H99Q/C122S/Y149L/M157K/R217G | 3860 |
| 461 | R36H/V38D/V41K/D97E/A98G/T97adel/H99L/L97bdel/C122S/V213A/R217D | 4030 |
| 182 | F30Y/V38D/Y40H/V41R/L97bA/H99Q/C122S/M157K/R217G | 4210 |
| 489 | F30Y/A32E/V38D/Y40H/V41R/L97bA/H99Q/C122S/M157K | 4280 |
| 172 | F30Y/V38D/V41R/L97bV/H99Q/C122S/Y151F/M157K | 5890 |
| 178 | F30Y/V38D/V41R/L97bV/H99Q/C122S/M157K | 6030 |
| 181 | F30Y/V38D/V41R/L97bV/H99Q/C122S/Y149N/Y151F/M157K | 7110 |
| 530 | F30H/V38D/L97bA/H99Q/C122S/Y151L/M157S/Q192L | 7340 |
| 194 | F30Y/H37D/V38D/Y40H/V41R/L97bA/H99Q/C122S/Y149L/M157K/R217G | 7760 |
| 755 | V38D/L97bR/H99E/C122S/E175D/R217A/K224S | 7770 |
| 758 | V38D/L97bR/H99E/C122S/E175D/R217A/K224Q | 7770 |
| 775 | F30Y/V38D/Y40H/V41K/L97bA/H99Q/C122S/Y151K/M157R/Q192E | 7770 |
| 776 | F30Y/V38D/Y40H/V41K/L97bA/H99Q/C122S/Y151K/M157S/Q192E | 7770 |
| 777 | F30Y/V38D/Y40H/V41K/L97bA/H99Q/C122S/Y151K/Q192E | 7770 |
| 778 | F30M/V38D/Y40F/V41R/L97bA/H99Q/C122S/Y151G/Q192T | 7770 |
| 779 | F30H/V38D/V41R/L97bA/H99Q/C122S/Y151M/M157R/Q192T | 7770 |
| 780 | F30H/V38D/Y40P/V41K/L97bA/H99Q/C122S/Y151H/M157E/Q192A | 7770 |
| 296 | V38D/L97bR/H99E/C122S/E175D | 7770 |
| 804 | V38E/T39W/V41T/D60aP/Y60bQ/T97aE/L97bA/H99Q/C122S/Y149V/Y151G/Q192T | 7770 |
| 303 | V38D/H99Q/C122S/R217Q | 7770 |
| 304 | V38D/L97bG/C122S/R217Q | 7770 |
| 856 | V38D/V41R/L97bT/C122S/Y151F/R217E | 7770 |
| 858 | V38D/V41R/L97bN/H99E/C122S/E175D/Q192M/R217E | 7770 |
| 911 | R36H/V38D/T39R/Y40F/V41R/H99S/C122S/R217T | 7770 |
| 918 | R36S/V38D/T39A/V41R/L97bV/H99S/C122S/R217T | 7770 |
| 905 | R36L/V38D/T39R/Y40L/V41T/L97bD/H99P/C122S/R217S | 7770 |
| 913 | R36S/V38D/T39K/Y40M/V41K/L97bI/C122S/R217E | 7770 |
| 919 | R37aH/V38D/T39R/Y40F/L97bT/C122S/R217E | 7770 |
| 910 | V38D/T39K/Y40F/V41Q/L97bI/H99S/C122S/R217T | 7770 |
| 917 | V38D/T39F/Y40L/V41K/L97bT/H99S/C122S/R217T | 7770 |
| 480 | F30Y/V38D/Y40L/V41R/L97bA/H99Q/C122S/Y151L/M157T/Q192L | 9990 |
| 474 | F30H/V38D/Y40F/V41R/L97bA/H99Q/C122S/Y151R/M157K | 9990 |
| 472 | F30H/V38D/V41R/L97bA/H99Q/C122S/Y151F/M157K/Q192W | 9990 |
| 185 | F30Y/V38D/Y40H/V41R/L97bA/H99Q/C122S/Y149L/M157K/R217G | 9990 |
| 188 | F30Y/V38D/Y40H/V41R/L97bA/H99Q/C122S/Y149F/M157K/R217G | 9990 |
| 266 | F30Y/R35W/R36H/H37E/V38E/T39W/Y40H/V41R/Y60bQ/T97aE/L97bA/H99Q/ | 9990 |
| | C122S/Y149K/M157K/Q192P | |
| 781 | R37aH/V38E/T39S/D60aR/Y60bG/T97aE/L97bA/H99Q/C122S/Y149T/Y151S | 9990 |
| 782 | R37aH/V38E/T39A/V41R/D60aG/Y60bG/T97aI/L97bA/H99Q/C122S/Y149V/Y151F/ | 9990 |
| | Q192R | |
| 783 | R37aH/V38E/T39H/V41R/D60aT/Y60bT/T97aI/L97bA/H99Q/C122S/Y149M/Y151N/ | 9990 |
| | Q192T | |
| 784 | R37aH/V38E/T39G/V41A/D60aG/Y60bE/T97aE/L97bA/H99Q/C122S/Y149R/Y151K/ | 9990 |
| | Q192T | |
| 785 | V38E/T39D/V41A/D60aA/Y60bR/T97aE/L97bA/H99Q/C122S/Y149W/Y151K/Q192T | 9990 |
| 786 | V38E/T39A/V41R/D60aH/Y60bH/T97aI/L97bA/H99Q/C122S/Y149M/Y151N/Q192T | 9990 |
| 787 | V38E/T39F/V41R/Y60bN/T97aE/L97bA/H99Q/C122S/Y149A/Y151G/Q192T | 9990 |
| 789 | R37aH/V38E/V41A/Y60bS/T97aE/L97bA/H99Q/C122S/Y149A/Y151M/Q192T | 9990 |
| 790 | R37aH/V38E/T39S/V41A/D60aG/Y60bE/T97aE/L97bA/H99Q/C122S/Y149S/Y151H | 9990 |
| 791 | R37aP/V38E/T39G/V41R/Y60bR/T97aE/L97bA/H99Q/C122S/Y149T/Y151P/Q192T | 9990 |
| 788 | V38E/T39D/V41A/D60aS/Y60bR/T97aE/L97bA/H99Q/C122S/Y149W/Y151K/Q192T | 9990 |
| 298 | V38D/L97bR/H99E/C122S/E175D/K224R | 9990 |
| 806 | V38E/T39W/V41Q/Y60bE/T97aE/L97bA/H99Q/C122S/Y149I/Y151G/Q192T | 9990 |
| 803 | V38E/T39W/V41T/Y60bK/T97aE/L97bA/H99Q/C122S/Y149I/Y151G/Q192T | 9990 |
| 857 | V38D/V41K/L97bA/H99L/C122S/Y151R/R217E | 9990 |
| 915 | R36S/V38D/T39K/Y40M/V41K/L97bH/H99T/C122S/R217S | 9990 |
| 641 | R35D/H37R/V38D/T39V/V41T/Y60bT/L97bA/H99Q/C122S/Q192A | 16600 |
| 5 | C122S | NA |
| 154 | V38D/T97a_L97bdel/C122S | NA |
| 155 | L73R/L97bG/H99Q/C122S | NA |
| 409 | V38D/V41T/A96E/D97E/T97aG/A98_H99del/C122S/E175K/R217H | NA |
| 407 | V38D/V41S/A96E/D97E/T97aG/A98_H99del/C122S/E175K | NA |
| NA | V38D/V41S/D97E/A96_-nulldelinsVG/A98_H99del/C122S/E175K/R217H | NA |
| 408 | V38D/V41A/A96_T97adelinsERG/A98_H99del/C122S/E175N | NA |
| NA | V38D/V41L/A96_A98del/-null_H100insRGL/C122S/Y172E/E175P | NA |
| 406 | V38D/V41S/A96D/D97E/T97aG/A98_H99del/C122S/E175S | NA |
| NA | V38D/V41A/A96del/-nulldelinsRG/A98_H99del/C122S/E175N/R217delinsF | NA |
| 405 | V38D/V41S/A96_T97adelinsERG/A98_H99del/C122S/E175A | NA |
| 156 | V38D/L73R/L97bG/H99Q/C122S | NA |
| NA | V38D/A96_-nulldelinsVG/D97E/A98_H99del/C122S | NA |
| NA | V38D/V41Q/A96_-nulldelinsAG/D97E/A98_H99del/C122S/R217K/K224R | NA |
| NA | R35S/V38_Y40delinsDRF/D60adelinsY/A96del/- | NA |
| | nulldelinsLK/A98_H99del/C122S/Y151L | |
| NA | R35T/V38_V41delinsDRF/V41M/D60aP/A96del/- | NA |
| | nulldelinsLK/A98_H99del/C122S/Y151L | |
| NA | R35K/V38_-nulldelinsDQHR/A96del/-nulldelinsLK/A98_H99del/C122S/Y151W | NA |
| 410 | R35K/V38D/T39S/Y40F/V41M/D60aN/A96D/D97L/A98K/T97adel/H99L/L97bdel/ | NA |
| | C122S/Y151L | |
| NA | R35K/V38D/T39S/Y40F/V41M/D60aN/A96del/- | NA |
| | nulldelinsLK/A98_H99del/C122S/Y151L | |
| NA | R35S/V38E/T39S/Y40H/V41R/A96del/-nulldelinsLK/A98_H99del/C122S/Y151W | NA |
| NA | R35K/V38D/T39K/Y40F/A96del/-nulldelinsLK/A98_H99del/C122S/Y151delinsG | NA |
| 411 | V38D/V41R/A96E/D97G/T97adelinsSG/A98_H99del/C122S | NA |
| 412 | V38D/L97bG/H99P/C122S/R217V/K224Q | NA |
| 412 | V38D/L97bG/H99P/C122S/R217V/K224Q | NA |
| 413 | V38D/A96G/D97R/A98G/T97adel/H99I/L97bdel/C122S | NA |
| NA | V38D/A96_-nulldelinsRGI/A98G/C122S | NA |
| 414 | V38D/A96E/D97E/T97aG/A98_H99del/L97bM/C122S | NA |
| NA | V38D/V41R/A96del/-null_T97ainsG/-null_L97binsG/A98_H99del/C122S/R217A | NA |
| 415 | V38D/V41R/A96D/D97G/T97aN/A98G/L97bdel/H99L/C122S/R217F | NA |
| NA | V38D/V41R/-nulldelinsDG/D97N/T97aG/A98_H99del/C122S/R217delinsF | NA |
| NA | V38D/V41R/A96E/- | NA |
| | null_L97binsG/D97E/A98_H99del/C122S/E175K/R217E/K224S | |
| 416 | V38D/V41Q/A96E/D97E/A98G/T97adel/H99L/L97bdel/C122S/R217H | NA |
| 416 | V38D/V41Q/A96E/D97E/T97aG/A98_H99del/C122S/R217H | NA |
| NA | V38D/V41S/A96del/-nulldelinsRG/A98_H99del/C122S/R217delinsY | NA |
| NA | V38D/V41R/A96del/-nulldelinsGG/A98_H99del/C122S/R217D | NA |
| 418 | V38D/V41K/A96D/D97E/T97aG/A98_H99del/C122S/R217K/K224N | NA |
| 419 | R36H/V38D/V41M/D97E/T97aG/A98_H99del/C122S/R217D | NA |
| 419 | R36H/V38D/V41M/D97E/A98G/T97adel/H99L/L97bdel/C122S/R217D | NA |
| 420 | V38D/V41H/A96D/D97E/T97aG/A98_H99del/C122S/R217delinsF | NA |
| 421 | V38D/D97E/T97aG/A98_H99del/C122S/E175G/R217H | NA |
| NA | V38D/A96P/D97_-nulldelinsVG/A98_H99del/C122S | NA |
| 157 | L97bP/H99L/C122S | NA |
| NA | -null_H99delinsRVG/L97bM/C122S | NA |
| NA | V41R/A96del/-null_T97ainsG/-null_L97binsG/A98_H99del/C122S | NA |
| NA | -null_H99delinsRG/D97G/L97bM/C122S/R217E/K224R | NA |
| 423 | V38D/L97bA/H99Q/C122S | NA |
| 425 | V38D/V41Q/A96N/D97G/T97aI/A98G/L97bdel/H99L/C122S | NA |
| 427 | V38D/V41K/A96K/D97E/A98G/T97adel/H99L/L97bdel/C122S | NA |
| 426 | R35S/V38D/V41T/A96D/D97G/A98G/T97adel/H99L/L97bdel/C122S | NA |
| 428 | R36H/V38D/V41S/A96E/D97R/A98G/T97adel/H99L/L97bdel/C122S/K224R | NA |
| 158 | R37aP/V38D/V41R/A96D/D97G/T97aN/A98G/L97bdel/H99L/C122S/M157K/R217F | NA |
| 159 | R37aS/G37bD/V38D/V41R/A96D/D97G/T97aN/A98G/L97bdel/H99L/C122S/R217F | NA |
| 160 | R36H/V38D/V41R/A96D/D97G/A98R/T97adel/H99L/L97bdel/C122S/M157K/R217D | NA |
| 161 | R37aH/V38D/V41R/A96D/D97G/A98G/T97adel/H99L/L97bdel/C122S/S174P/R217D | NA |
| 162 | R37aH/V38D/V41G/A96G/D97E/T97aA/A98G/L97bdel/H99M/C122S/Y151N | NA |
| 163 | R36S/V38D/Y40L/V41R/A96P/D97V/T97aR/A98G/L97bdel/H99L/C122S | NA |
| 165 | V38D/V41R/A96D/D97G/A98G/T97adel/H99L/L97bdel/C122S/Q192E/R217D | NA |
| 166 | F30Y/V38D/V41R/A96D/D97G/A98G/T97adel/H99L/L97bdel/C122S/M157K/R217D | NA |
| 431 | V38D/V41R/A96D/D97G/A98G/T97adel/H99L/L97bdel/C122S/Y151K/Q192E/R217D | NA |
| 433 | V38D/V41R/A96D/D97G/A98G/T97adel/H99L/L97bdel/C122S/Y151W/Q192M/R217D | NA |
| 437 | V38D/V41R/A96D/D97G/A98G/T97adel/H99L/L97bdel/C122S/Y151N/Q192M/R217D | NA |
| 439 | R36H/V38D/Y40H/V41K/D97E/A98G/T97adel/H99L/L97bdel/C122S/Y151K/Q192V/ | NA |
| | R217D | |
| 440 | R36H/V38D/Y40L/V41K/D97E/A98G/T97adel/H99L/L97bdel/C122S/Y151R/Q192L/ | NA |
| | R217D | |
| 441 | R36H/V38D/Y40V/V41K/D97E/A98G/T97adel/H99L/L97bdel/C122S/Y151F/Q192F/ | NA |
| | R217D | |
| 442 | R36H/V38D/D97E/A98G/T97adel/H99L/L97bdel/C122S/Y151K/Q192E/R217D | NA |
| 443 | R36H/V38D/Y40L/V41K/D97E/A98G/T97adel/H99L/L97bdel/C122S/Y151K/Q192E/ | NA |
| | R217D | |
| 449 | R36H/V38D/V41K/D97E/A98G/T97adel/H99L/L97bdel/C122S/Y151K/Q192E/R217D | NA |
| 453 | R36H/V38D/Y40F/V41K/D97E/A98G/T97adel/H99L/L97bdel/C122S/Y151R/Q192E/ | NA |
| | R217D | |
| 454 | R36H/V38D/Y40L/V41R/D97E/A98G/T97adel/H99L/L97bdel/C122S/Y151N/Q192V/ | NA |
| | R217D | |
| 455 | R36H/V38D/Y40L/V41R/D97E/A98G/T97adel/H99L/L97bdel/C122S/Y151N/Q192D/ | NA |
| | R217D | |
| 456 | R36H/V38D/V41R/D97E/A98G/T97adel/H99L/L97bdel/C122S/Y151K/Q192E/R217D | NA |
| 457 | R36H/V38D/Y40F/V41R/D97E/A98G/T97adel/H99L/L97bdel/C122S/Y151K/Q192E/ | NA |
| | R217D | |
| 458 | R36H/V38D/Y40I/V41A/D97E/A98G/T97adel/H99L/L97bdel/C122S/Y151M/Q192L/ | NA |
| | R217D | |
| 459 | R36H/V38D/Y40H/V41M/D97E/A98G/T97adel/H99L/L97bdel/C122S/R217D | NA |
| 464 | R36H/V38D/V41R/A96D/D97G/T97aN/A98G/L97bdel/H99L/C122S/G193R/R217F | NA |
| 467 | V38D/V41R/A96D/D97G/A98G/T97adel/H99L/L97bdel/C122S/Q192R/R217D | NA |
| 468 | F21S/R36H/V38D/V41R/A96D/D97G/A98G/T97adel/H99L/L97bdel/C122S/E175D/ | NA |
| | R217D | |
| 470 | R36H/V38D/V41R/A96D/D97E/A98G/T97adel/H99L/L97bdel/C122S/G193R/R217D | NA |
| 168 | V38D/Y40P/V41K/L97bA/H99Q/C122S/M157K | NA |
| 430 | V38D/V41R/A96D/D97G/A98G/T97adel/H99L/L97bdel/C122S/Y151M/Q192E/R217D | NA |
| 512 | F30H/R35T/H37M/V38D/V41R/D60aS/Y60bT/L97bA/H99Q/A112V/C122S/Y151L/ | NA |
| | M157K/R217T | |
| 220 | V38D/V41R/L97bA/H99Q/C122S | NA |
| 531 | F30N/V38D/Y40F/V41R/L97bA/H99Q/C122S/Y151L/M157S/Q192H | NA |
| 257 | F30Y/R35Y/R36H/H37E/V38E/T39S/Y40H/V41W/Y60bW/T97aI/L97bA/H99Q/C122S/ | NA |
| | Y149R/M157K/Q192F | |
| 306 | V38D/L97bG/H99Q/C122S/S195A/R217Q | NA |
| 342 | V38D/C122S/S190H/G216A | NA |

*SEQ ID the of an exemplary protease domain containing the replacements

### Example 3

### Anti-C3 Activity of u-PA Variants in Cynomolgus Monkey Plasma

[0755] The ex vivo anti-C3 activity of some modified u-PA polypeptides was measured in purchased cynomolgus monkey plasma (BioChemed). The median effective dose (ED₅₀) of modified u-PA polypeptides for cleaving C3 was calculated using ELISA. Briefly, exemplary modified u-PA polypeptides were serially diluted 1:1.5 fold from 1000 nM to 39.0 nM (9 point dilution). The hC3 standard was serially diluted 1:1.5 fold from 450 to 39 (7 point dilution) in 1% BSA in 1×PBST (Phosphate Buffered Saline Tween-20) A recipe for 1×PBST includes:

[0756] 1. Dissolve the following in 800 ml of distilled H₂O
[0757] 8 g of NaCl
[0758] 0.2 g of KCl
[0759] 1.44 g of Na₂HPO₄
[0760] 0.24 g of KH₂PO₄
[0761] 2 ml of tween-20

[0762] 2. Adjust pH to 7.2

[0763] 3. Adjust volume to 1 L with additional distilled H₂O

[0764] 4. Sterilize by autoclaving.

[0765] 80% Cynomolgus vitreous plasma (obtained from BioChemed) in buffer containing 50 mM Tris, pH 8.0, 50 mM NaCl, and 0.01% Tween-20, and dilutions of C3, was incubated with modified u-PA polypeptides at a final concentration of 0.1 μM at 37° C. for 10 minutes. The 80% plasma digests were diluted 1:15,625 in 1% BSA in 1×PBST using the Biomek liquid handling system (Beckman Coulter). Flat bottom EIA plates (Bio-Rad) coated with purified A213 antibody (anti-C4; Quidel specialty products) at 2.0 μg/mL, were incubated with 50 μL/well of sample or standard and detected with Anti-hC3a antibody (ab11872; Abcam) in 1% BSA in 1×PBST. The wells were further coated with HRP conjugate Goat anti Mouse-HRP antibody (Jackson ImmunoResearch; catalog number: 115-035-003) at a 1:30,000 dilution in 1% BSA in 1×PBST and developed with WesternBright ECL (chemiluminescent) HRP substrate for detection.

[0766] The ED₅₀ is defined as the concentration of protease that produces a 50% loss of C3. The results show an increased loss (i.e., cleavage) of C3 in the presence of the modified u-PA polypeptides with the sequence set forth in SEQ ID NOs: 8-14 and 16-20. The u-PA polypeptide protease domain with the sequence set forth in SEQ ID NO: 8, cleaved with an ED₅₀ that was several fold higher than the others. The results are set forth in Table 15 below.

TABLE 15
anti-C3 Activity in cynomolgus monkey plasma

| | | ED₅₀ 80% |
|---|---|---|
| | SEQ | cynomolgus |
| | ID | plasma |
| Chymotrypsin numbering | NO* | (10 min, nM) |
| F30Y/V38D/Y40H/V41R/L97bA/H99Q/ | 8 | 1700 |
| C122S/M157K | | |
| F30Y/R35W/R36H/H37E/V38E/T39W/Y40H/ | 9 | 176 |
| V41R/Y60bQ/T97aE/L97bA/H99Q/C122S/ | | |
| Y149K/M157KF30Y/R35W/R36H/ | 10 | 114 |
| H37D/V38E/T39Y/Y40F/ | | |
| V41R/T97aI/L97bA/H99Q/C122S/Y149R/M157K | | |
| R35W/R36H/H37N/V38E/T39F/Y40F/V41R/T97aI/ | 11 | 309 |
| L97bA/H99Q/C122S/Y149R/M157K/Q192H | | |
| F30Y/R35Y/R36H/H37K/V38E/T39F/Y40F/V41R/ | 12 | 286 |
| T97aI/L97bA/H99Q/C122S/Y149R/M157K | | |
| F30Y/R35W/R36H/H37N/V38E/T39Y/Y40F/V41R/ | 13 | 222 |
| Y60bS/T97aE/L97bA/H99Q/C122S/Y149K/M157K | | |
| F30Y/R35W/R36H/H37P/V38E/T39Y/Y40F/V41R/ | 14 | 145 |
| Y60bS/T97aE/L97bA/H99Q/C122S/Y149K/M157K | | |
| F30Y/R35Q/R36H/H37G/R37aE/V38E/ | 16 | 481 |
| T39F/Y40F/V41R/D60aP/Y60bS/T97aI/ | | |
| L97bA/H99Q/C122S/Y149R/M157K | | |
| F30Y/R35Y/R36H/H37P/R37aQ/V38E/ | 17 | 215 |
| T39Y/Y40F/V41R/Y60bH/T97aI/L97bA/ | | |
| H99Q/C122S/Y149R/M157K | | |
| R35Q/H37Y/R37aE/V38E/T39Y/V41R/D60aT/ | 18 | 244 |
| Y60bT/T97aI/L97bA/H99Q/C122S/Y149R | | |
| R35W/H37P/R37aN/V38E/T39Y/V41R/D60aP/ | 19 | 214 |
| Y60bL/T97aI/L97bA/H99Q/C122S/Y149R | | |
| R35W/H37D/R37aP/V38E/T39W/V41R/Y60bA/ | 20 | 175 |
| T97aI/L97bA/H99Q/C122S/Y149R | | |

*SEQ ID the of exemplary protease domain containing the replacements

### Example 4

### Anti-C3 Activity of Modified u-PA Polypeptides in Cynomolgus Monkey Vitreous Humor

[0767] The activity of modified u-PA polypeptides was assessed by cleavage of the substrate complement protein human C3. 2 μM purified human C3 (Complement Technologies; Tyler, Tex.) was incubated with the modified u-PA polypeptides (0-250 nM) for 1 hour at 37° C. in purchased monkey vitreous humor (BioChemed). The activity of the modified u-PA polypeptides was then quenched by the addition of the urokinase inhibitor Glu-Gly-Arg Chlormethyl Ketone (EGR-CMK; Haematologic Technologies, EGRCK-01) to a final concentration of 10 μM and the hC3/modified u-PA polypeptide mixture was allowed to stand for 30 minutes at ambient temperature. Residual levels of undigested human C3 were quantified using an ELISA. All modified u-PA polypeptides, including those that contain the replacements R35Q/H37Y/R37aE/V38E/T39Y/V41R/D60aP/Y60bQ/T97aI/L97bA/H99Q/C122S/Y149R, Y40Q/V41L/L97bA/C122S and Y40Q/V41L/L97bA/C122S, and Y40Q/V41R/L97bA/C122S, cleaved complement protein C3 with a higher turnover number (per hour) than the reference u-PA polypeptide containing the C122S replacement set forth in SEQ ID NO: 5. The results are set forth in Table 16 below.

TABLE16
C3 cleavage in vitreous humor

| | | C3 |
|---|---|---|
| | SEQ | Turnover |
| | ID | Number |
| Chymotrypsin numbering | NO* | (hr⁻¹) |
| u-P wild type u-PA with C122S | 5 | 0.3 |
| V38E/Y40Q/V41L/Y60bL/L97bA/H99Q/C122SR35Q/ | 15 | 29 |
| H37Y/R37aE/V38E/T39Y/V41R/D60aP/Y60bQ/ | | |
| T97aI/L97bA/H99Q/C122S/Y149R | 21 | 48 |
| Y40Q/V41L/L97bA/C122S | 40 | 8 |
| Y40Q/V41L/Y60bL/L97bA/H99Q/C122S | 34 | 42 |
| V38E/Y40Q/Y60bL/L97bA/H99Q/C122S | 35 | 17 |
| V38E/Y40Q/V41L/L97bA/H99Q/C122S | 36 | 56 |
| V38E/Y40Q/V41L/Y60bL/H99Q/C122S | 37 | 18 |
| V38E/Y40Q/V41L/Y60bL/L97bA/C122S | 38 | 12 |
| R37aS/V41R/L97bG/H99Q/C122S | 41 | 5 |
| T39Y/V41R/L97bA/H99Q/C122S | 42 | 17 |
| T39Y/V41R/Y60bQ/L97bA/H99Q/C122S | 43 | 26 |
| T39Y/V41R/D60aP/L97bA/H99Q/C122S | 44 | 17 |

*SEQ ID the of protease domain containing the replacements

### Example 5

### Ex Vivo Stability of Modified u-PA Polypeptides in Cynomolgus Monkey Vitreous Humor

[0768] The ex vivo stability of modified u-PA polypeptides was assessed in purchased cynomolgus monkey vitreous humor or Phosphate Buffered Saline (PBS) control. Modified u-PA polypeptides that exhibit stability in vitreous humor can be used for treatment of AMD.

[0769] 80% Cynomolgus vitreous humor (obtained from BioChemed; Catalog Nos. BC7615-V1, BC60815-V1, BC33115-V6) in buffer containing 50 mM Tris, pH 8.0, 50 mM NaCl, and 0.01% Tween-20 or PBS control was incubated with modified u-PA polypeptides at a final concentration of 0.1 μM. These mixtures were incubated at 37° C. for 7 days, and the residual protease activity was assayed with 100 μM fluorogenic substrate AGR-ACC (7-amino-4-carbamoylmethyl-coumarin) in 50 mM Tris, pH 8.0, 50 mM NaCl, 0.01% Tween-20 (assay results were assessed at excitation wavelength=380 nm and emission wavelength=460 nm). The results show that the modified u-PA polypeptides with the sequence set forth in SEQ ID NOs: 21-33 exhibit comparable activity in cynomolgus plasma and PBS. The results are set forth in Table 17 below.

TABLE17
Stability of Modified u-PA polypeptides in vitreous humor

| | SEQ | Activity (%) | |
|---|---|---|---|
| | ID | on Day 7 | |
| Chymotrypsin numbering | NO* | vitreous | PBS |
| wild type u-PA protease domain with C122S | 5 | 102 | 111 |
| R35Q/H37Y/R37aE/V38E/T39Y/V41R/D60aP/ | 21 | 83 | 94 |
| Y60bQ/T97aI/L97bA/H99Q/C122S/Y149R | | | |
| H37Y/R37aE/V38E/T39Y/V41R/D60aP/Y60bQ/ | 22 | 73 | 79 |
| T97aI/L97bA/H99Q/C122S/Y149R | | | |
| R35Q/R37aE/V38E/T39Y/V41R/D60aP/Y60bQ/ | 23 | 88 | 92 |
| T97aI/L97bA/H99Q/C122S/Y149R | | | |
| R35Q/H37Y/V38E/T39Y/V41R/D60aP/Y60bQ/ | 24 | 87 | 99 |
| T97aI/L97bA/H99Q/C122S/Y149R | | | |
| R35Q/H37Y/R37aE/T39Y/V41R/D60aP/Y60bQ/ | 25 | 105 | 103 |
| T97aI/L97bA/H99Q/C122S/Y149R | | | |
| R35Q/H37Y/R37aE/V38E/V41R/D60aP/Y60bQ/ | 26 | 93 | 108 |
| T97aI/L97bA/H99Q/C122S/Y149R | | | |
| R35Q/H37Y/R37aE/V38E/T39Y/D60aP/Y60bQ/ | 27 | 88 | 100 |
| T97aI/L97bA/H99Q/C122S/Y149R | | | |
| R35Q/H37Y/R37aE/V38E/T39Y/V41R/Y60bQ/ | 28 | 93 | 97 |
| T97aI/L97bA/H99Q/C122S/Y149R | | | |
| R35Q/H37Y/R37aE/V38E/T39Y/V41R/D60aP/ | 29 | 58 | 61 |
| T97aI/L97bA/H99Q/C122S/Y149R | | | |
| R35Q/H37Y/R37aE/V38E/T39Y/V41R/D60aP/ | 30 | 86 | 92 |
| Y60bQ/L97bA/H99Q/C122S/Y149R | | | |
| R35Q/H37Y/R37aE/V38E/T39Y/V41R/D60aP/ | 31 | 90 | 111 |
| Y60bQ/T97aI/H99Q/C122S/Y149R | | | |
| R35Q/H37Y/R37aE/V38E/T39Y/V41R/D60aP/ | 32 | 89 | 108 |
| Y60bQ/T97aI/L97bA/C122S/Y149R | | | |
| R35Q/H37Y/R37aE/V38E/T39Y/V41R/D60aP/ | 33 | 74 | 99 |
| Y60bQ/T97aI/L97bA/H99Q/C122S | | | |

*SEQ ID the of exemplary protease domain containing the replacements

[0770] The ex vivo stability of the anti-C3 u-PA variants in Table 18 below was assessed after incubation in purchased cynomolgus monkey vitreous humor for both 7 and 28 days. The results show that several of the variants maintain significant activity even after the 28 day incubation. The results are set forth in Table 18 below.

Table 18
Stability of Modified u-PA polypeptides in vitreous humor

| | SEQ | | |
|---|---|---|---|
| | ID | Activity (%) | |
| Chymotrypsin numbering | NO* | Day 7 | Day 28 |
| wild type u-PA with C122S | 5 | 106 | 90 |
| V38E/Y40Q/V41L/Y60bL/L97bA/H99Q/C122S | 15 | 43 | n/d |
| R35Q/H37Y/R37aE/V38E/T39Y/V41R/D60aP/ | 21 | 83 | 34 |
| Y60bQ/T97aI/L97bA/H99Q/C122S/Y149R | | | |
| Y40Q/V41L/Y60bL/L97bA/H99Q/C122S | 34 | 42 | n/d |
| V38E/Y40Q/Y60bL/L97bA/H99Q/C122S | 35 | 28 | n/d |
| V38E/Y40Q/V41L/L97bA/H99Q/C122S | 36 | 17 | n/d |
| V38E/Y40Q/V41L/Y60bL/H99Q/C122S | 37 | 73 | n/d |
| V38E/Y40Q/V41L/Y60bL/L97bA/C122S | 38 | 71 | n/d |
| Y40Q/V41L/L97bA/C122S | 40 | 56 | 28 |
| R37aS/V41R/L97bG/H99Q/C122S | 41 | 100 | 74 |
| T39Y/V41R/L97bA/H99Q/C122S | 42 | 92 | 61 |
| T39Y/V41R/Y60bQ/L97bA/H99Q/C122S | 43 | 98 | 58 |
| T39Y/V41R/D60aP/L97bA/H99Q/C122S | 44 | 86 | 42 |

*SEQ ID the of protease domain containing the replacements

### Example 6

### Ex Vivo Pharmacodynamic Assay in Human Plasma

[0771] Modified u-PA polypeptides (protease domains) were incubated with 80% human plasma prior to addition of erythrocytes to assess cleavage of complement protein C3 in a hemolytic assay of complement activity. Performing functional assays in the presence of human plasma tests the activity of the anti-C3 proteases in a pharmaceutically relevant environment and, for example, examines whether they are sensitive to inactivation by serpins or other protease inhibitors present in human blood. The modified u-PA polypeptides provided herein were not inhibited, in general, in the presence of human plasma. This is of significance for treatment of diseases and disorders and conditions, such as DGF, in which the administered modified u-PA polypeptides are exposed to human plasma, such as when administered intravenously. It is of lesser or no importance for applications, such as treatment of AMD by intravitreal or intraretinal or subretinal injection, where the modified u-PA polypeptides are not exposed to plasma.

[0772] An ED₅₀ value, which is the concentration of protease at which 50% inhibition of complement activity is achieved, was measured. The wild-type u-PA protease domain (SEQ ID NO:5, with C122S), and various exemplary modified u-PA protease domains were serially diluted from 3 μM to 0.11 μM (9 point serial dilution 1:2) to measure the ED₅₀. The wild-type u-PA (SEQ ID NO:5) protease domain and modified u-PA protease domains were preincubated with a final concentration of 80% plasma in an 0.2 mL tube by combining 4 μL of the diluted protease solution and 16 μL of human plasma (with sodium citrate as an anticoagulant; Innovative Research, Inc.). This resulted in a further dilution of the protease to give a final concentration of 0.6 μM to 0.0022 μM protease for the EC₅₀ protocol. A no-protease control (18 μL plasma and 2 μL PBST) and a background control (20 μL PBST only) also were included in the assays. The reaction was incubated at 37° C. for 1 hour. The reaction mixtures were further diluted to 20% plasma with the addition of 70 μL PBST.

[0773] Sensitized sheep erythrocytes (Diamdex, Miami, Fla.) were concentrated to 10×by pelleting a 3.0 ml aliquot, removing 2.7 mL of buffer and resuspending the cell pellet in the remaining 0.3 ml buffer. The concentrated sensitized erythrocytes were added to polypropylene 96-well plates at a volume of 12 μL per well. Preincubated protease/plasma mixtures at 6 μL or 60 μL were added to the erythrocytes to give a final concentration of 1% plasma or 10% plasma, respectively, in a final volume of 120 μL (PBST added to final volume). The solution was incubated with shaking at room temperature for 45 minutes. The cells were spun down at 2000 rpm for 5 minutes to pellet the unbroken cells, and 100 μL of the supernatant was removed and placed in a clear 96-well microtiter plate.

[0774] Release of hemoglobin from the lysed red blood cells was monitored by reading the optical density (OD) at 415 nm. The fraction hemolysis was calculated by subtracting the background control from all of the wells, then dividing the experimental samples by the no-protease control (positive control), where the fraction of hemolysis of the positive control was set at 1.00. The ED₅₀ (nM) of hemolysis by the proteases were measured by plotting the fraction hemolysis vs. protease concentration on a 4 parameter logistic curve fit (SoftMax Pro software, Molecular Devices, CA).

[0775] The results are shown in Table 19 below, which sets forth the ED₅₀ (nM) for hemolysis in 80% human plasma by wild type u-PA with the C122S mutation set forth in SEQ ID NO: 5 and the modified u-PA polypeptides. As shown in Table 19, the ED₅₀ for wild type u-PA in 80% human plasma is greater than 6 μM; whereas exemplary modified u-PA protease domain polypeptides have significantly increased ability to inhibit complement as indicated by a lower ED₅₀ (e.g., between 173 nM and 1.028 μM).

TABLE 19
C3 inhibition in human plasma

| | | ED50 80% |
|---|---|---|
| | SEQ | human |
| | ID | plasma |
| Chymotrypsin numbering | NO.* | (60 min, nM) |
| wild type u-PA (protease domain) with C122S | 5 | >6000 |
| F30Y/V38D/Y40H/V41R/L97bA/H99Q/ | 8 | 1028 |
| C122S/M157K | | |
| F30Y/R35W/R36H/H37E/V38E/T39W/Y40H/V41R/ | 9 | 257 |
| Y60bQ/T97aE/L97bA/H99Q/C122S/Y149K/M157K | | |
| F30Y/R35W/R36H/H37D/V38E/T39Y/Y40F/V41R/ | 10 | 195 |
| T97aI/L97bA/H99Q/C122S/Y149R/M157K | | |
| R35W/R36H/H37N/V38E/T39F/Y40F/V41R/T97aI/ | 11 | 208 |
| L97bA/H99Q/C122S/Y149R/M157K/Q192H | | |
| F30Y/R35Y/R36H/H37K/V38E/T39F/Y40F/V41R/ | 12 | 227 |
| T97aI/L97bA/H99Q/C122S/Y149R/M157K | | |
| F30Y/R35W/R36H/H37N/V38E/T39Y/Y40F/V41R/ | 13 | 220 |
| Y60bS/T97aE/L97bA/H99Q/C122S/Y149K/M157K | | |
| F30Y/R35W/R36H/H37P/V38E/T39Y/Y40F/V41R/ | 14 | 185 |
| Y60bS/T97aE/L97bA/H99Q/C122S/Y149K/M157K | | |
| F30Y/R35Q/R36H/H37G/R37aE/V38E/T39F/ | 16 | 220 |
| Y40F/V41R/D60aP/Y60bS/T97aI/L97bA/ | | |
| H99Q/C122S/Y149R/M157K | | |
| F30Y/R35Y/R36H/H37P/R37aQ/V38E/T39Y/ | 17 | 173 |
| Y40F/V41R/Y60bH/T97aI/L97bA/H99Q/ | | |
| C122S/Y149R/M157K | | |
| R35Q/H37Y/R37aE/V38E/T39Y/V41R/D60aT/ | 18 | 253 |
| Y60bT/T97aI/L97bA/H99Q/C122S/Y149R | | |
| R35W/H37P/R37aN/V38E/T39Y/V41R/D60aP/ | 19 | 318 |
| Y60bL/T97aI/L97bA/H99Q/C122S/Y149R | | |
| R35W/H37D/R37aP/V38E/T39W/V41R/Y60bA/ | 20 | 196 |
| T97aI/L97bA/H99Q/C122S/Y149R | | |

*SEQ ID the of exemplary protease domain containing the rep acements

### Example 7

### Kinetic Analysis of Plasminogen Activation Using an Indirect Chromogenic Assay

[0776] An indirect chromogenic assay was performed to determine the activities of the wild-type and modified u-PA polypeptides produced as purified protein preparations (see, Madison et al. (1989) Nature, 339: 721-724; Madison et al. (1990) J Biol. Chem., 265: 21423-21426). In this assay, free p-nitroaniline is released from the chromogenic substrate Spectrozyme PL (H-D-norleucylhexahydrotyrosyl-lysine-p-nitroanilide diacetate salt, American Diagnostics, Inc.) by the action of plasmin generated by the action of u-PA on plasminogen. The release of free p-nitroaniline was measured spectrophotometrically at OD₄₀₅ nm.

[0777] For the assay, 100 μL reaction mixtures containing 0.25-1 ng of the u-PA enzymes to be tested, 0.62 mM Spectrozyme PL, and 0.2 μM Lys-plasminogen (American Diagnostics, Inc.), were combined in a buffer containing 50 mM Tris-HCL (pH 7.5), 0.1 M NaCl, 1.0 mM EDTA and 0.01% (v/v) Tween 80. The reaction was incubated at 37° C. in 96-well, flat-bottomed microtiter plates (Costar, Inc.) and the optical density at 405 nm (OD₄₀₅) was read every 30 s for 1 hour in a Molecular Devices Thermomax. The kinetic constants k_{cat}, Kₘ, and k_{cat}/Kₘ (specificity constant) were calculated (see, e.g., Madison, E. L (1989) Nature 339: 721-724).

[0778] The results are set forth in Table 20 below. The results show that the modified u-PA polypeptides have significantly decreased enzymatic activity for the substrate plasminogen. All of modified u-PA polypeptides provided herein have reduced activity on and specificity for plasminogen; and all have many-fold increases in specificity and activity on C3, and for inhibiting complement activation compared to the unmodified u-PA.

TABLE 20
Kinetic Analysis of Plasminogen Activation

| | SEQ | |
|---|---|---|
| | ID | k_{cat}/Kₘ |
| Chymotrypsin numbering | NO.* | (M⁻¹s⁻¹) |
| wild type u-PA with C122S | 5 | 1.54E+04 |
| F30Y/V38D/Y40H/V41R/L97bA/H99Q/C122S/M157K | 8 | 4.03E+02 |
| F30Y/R35W/R36H/H37E/V38E/T39W/Y40H/V41R/ | 9 | <1.0E+01 |
| Y60bQ/T97aE/L97bA/H99Q/C122S/Y149K/M157K | | |
| F30Y/R35Y/R36H/H37K/V38E/T39F/Y40F/V41R/ | 12 | <1.0E+01 |
| T97aI/L97bA/H99Q/C122S/Y149R/M157K | | |
| R35Q/H37Y/R37aE/V38E/T39Y/V41R/D60aT/ | 18 | <1.0E+01 |
| Y60bT/T97aI/L97bA/H99Q/C122S/Y149R | | |
| R35W/H37D/R37aP/V38E/T39W/V41R/Y60bA/ | 20 | <1.0E+01 |
| T97aI/L97bA/H99Q/C122S/Y149R | | |
| F30Y/R35Y/R36H/H37P/R37aQ/V38E/ | 17 | <1.0E+01 |
| T39Y/Y40F/V41R/Y60bH/T97aI/L97bA/ | | |
| H99Q/C122S/Y149R/M157K | | |

*SEQ ID the of exemplary protease domain containing the replacements

### Example 8

### Anti-C3 Activity and Stability of Anti-C3 u-PA Variant in Cynomolgus Monkey Vitreous Humor In Vivo

[0779] The in vivo activity and stability of the modified u-PA polypeptide set forth in SEQ ID NO:21, which is the protease domain that contains the replacements R35Q/H37Y/R37aE/V38E/T39Y/V41R/D60aP/Y60bQ/T97aI/L97bA/H99Q/C122S/Y149R was assessed. Stability in vitreous humor and ability to cleave C3 are parameters indicative of a candidate for treatment of AMD.

[0780] Twelve naive cynomolgus monkeys were assigned to a single treatment group. Study animals were intravitreally administered a single dose 125 μg of modified u-PA polypeptide in one eye. The isolated protease domain whose sequence is set forth in SEQ ID NO:21, which has a molecular weight of approximately 25 kDa, was administered. The right eye received the test article and the left eye was injected with vehicle control. Four animals were sacrificed at each of the following time points: 24 hours post-dose, day 2 and on day 6. Vitreous humor samples were collected from the right and left eyes and analyzed for modified u-PA polypeptide stability and level of C3 after treatment with modified u-PA polypeptide or vehicle control; C3 and modified u-PA polypeptide concentration were determined by ELISA as detailed above.

[0781] The concentration of the modified u-PA polypeptide present in vitreous humor samples obtained 24 hours post-dose, on day 2 and on day 6 was determined by ELISA. The activity of the modified u-PA polypeptides was then quenched by the addition of EGR-CMK (Haematologic Technologies, EGRCK-01) to a final concentration of 10 μM and the hC3/modified u-PA polypeptide mixture was allowed to stand for 30 minutes at ambient temperature.

[0782] The half-life of modified u-PA polypeptide of SEQ ID NO:21 was determined to be approximately 2 days, which should correspond to approximately 5 days in a human system (Deng et al. MAbs 3(1): 61-66 (2011)). In vivo recovery (i.e., the peak level of modified u-PA polypeptide divided by the dose of modified u-PA polypeptide) of the modified u-PA polypeptide (of SEQ ID NO:21) was calculated by ELISA from the observed maximum level of modified u-PA polypeptide. The theoretical predicted value for 100% in vivo recovery was 2.5 μM. The measured in vivo recovery of modified u-PA protease domain (SEQ ID NO: 21) containing the replacements: R35Q/H37Y/R37aE/V38E/T39Y/V41R/D60aP/Y60bQ/T97aI/L97bA/H99Q/C122S/Y149R was calculated to be approximately 80% of the predicted value, or approximately 2.0 μM.

[0783] C3 levels in vitreous humor were assessed by ELISA as detailed in Example 3. C3 levels in vehicle-injected negative control eye ranged between 0.4 nM-50 nM (2 samples from vehicle-injected eyes differed significantly from the other 10, likely due to blood contamination of the vitreous). The baseline level of C3 prior to u-PA administration was approximately 2.2 nM. C3 was undetectable in variant-treated eye after 1 day and 7 days. After 28 days, C3 concentration in the eye treated with the modified u-PA polypeptide with the sequence set forth in SEQ ID NO: 21 was approximately 2.2 nM, which is equivalent to before-treatment levels. Thus, modified u-PA polypeptides provided herein are candidates for treatment of AMD.

### Example 9

### Exemplary Mutations in u-PA and Confirmation of Cleavage Sites

[0784] Exemplary positions and mutations in u-PA polypeptides, including the full-length, precursor and protease domains and catalytically active portions thereof are set forth in Table 22 (below).

TABLE 22
Exemplary mutations in u-PA

| | | | Mutation | | |
|---|---|---|---|---|---|
| Chymo | Mature | | in the poly- | | Conser- |
| numb- | numb- | | peptide of | Exemplary | vative to |
| ering | ering | wt | SEQ ID NO: 21 | mutations | Mutations |
| 30 | 173 | F | | Y, | W, F |
| 35 | 178 | R | Q | Q, W, Y | Y, W, F, N |
| 36 | 179 | R | | H | N, Q |
| 37 | 180 | H | Y | Y, E, P, | D, E, Q, |
| | | | | D, N, G, | H, P, R, Q, |
| | | | | K, Y | E, W, F |
| 37a | 181 | R | E | E, P, Q, N | D, Q, H |
| 38 | 185 | V | E | E | |
| 39 | 186 | T | Y | W, Y, F | M, L |
| 40 | 187 | Y | Q, F | M, L, Y, N, Q | |
| 41 | 188 | V | R | R, L | K |
| 60a | 208 | D | P | P | S |
| 60b | 209 | Y | Q | L, Q, S, | N, T, G, S, |
| | | | | A, Y, T | I, V, Q |
| 97a | 249 | T | I | E, I | D, L, V |
| 97b | 250 | L | A | A, G | G, S |
| 99 | 252 | H | Q | Q | N |
| 149 | 306 | Y | R | K, R | Q, E |
| 157 | 314 | M | | K | R, Q, E |
| 192 | 353 | Q | | H | N, Q |

[0785] The replacements are in any form of u-PA, including the protease domain (SEQ ID NO: 2 or 5); the full length (SEQ ID NO: 1 or 4) and mature form (SEQ ID NO: 3 or 6). The replacements can be combined, including as exemplified herein, including up to as many as 15-18 or more replacements.

[0786] The data show that the modified u-pA polypeptides with these mutations, cleave and inactivate C3 in multiple species such as human and cynomolgus monkey. Cleavage of human C3 can be between residues 740 and 741 (SEQ ID NO:47), and this cleavage inactivates C3:

| | |
|---|---|
| Q H A R ↓ A S H L | 737-744 |
| P4 P3 P1 ↓ P1′ P4′. | |

[0787] As demonstrated above, and throughout the disclosure, the modified u-PA polypeptides cleave and inactivate C3. The modified u-PA polypeptides were selected for cleavage in this region, and it was confirmed by testing them. For example, C3 was incubated with either modified u-PA protease domain (SEQ ID NO: 21) containing the replacements: R35Q/H37Y/R37aE/V38E/T39Y/V41R/D60aP/Y60bQ/T97aI/L97bA/H99Q/C122S/Y149R or with the modified u-PA protease domain (SEQ ID NO:40) with the replacements Y40Q/V41L/L97bA/C122S at enzyme to substrate ratios of 1:10 or 1:50 for a total of one hour. Samples were removed from these reactions at 0, 5, 10, 20, 40, and 60 minutes, and the cleavage reaction was terminated immediately in each sample by addition of TFA and flash freezing in dry ice. Prior to further analysis of these samples, cysteine side chains were reduced and alkylated, the e-amino group of lysine side chains was blocked by treatment with O-methylisourea, and peptide amino termini were then labeled with NHS-SS-biotin. The resulting biotinylated C3 peptides were captured and further digested with trypsin and GluC protease. Following this second protease digestion, peptide products were once again affinity captured. Biotin was then removed from the captured peptides by reduction, and the peptide mixture was analyzed by LC-MS/MS. At each time point after 0 minutes a fragment of MW 8289 was observed, indicating cleavage at the arginine in the QHAR site in C3. No additional C3 cleavage sites were observed in these reactions. Hence the modified u-PA polypeptides provided herein cleave at the QHAR.

| | |
|---|---|
| Q H A R ↓ A S H L | 737-744 |
| P4 P3 P2 P1↓ P1′ P4′. | |

### Example 10

### u-PA Toxicity in Cynomolgus Monkey Vitreous Humor

[0788] Safety and tolerability of modified u-PA polypeptides were assessed in vivo in cynomolgus monkeys. Three naive cynomolgus monkeys were assigned to each of three treatment groups. Study animals were intravitreally administered either 12.5 μg, 37.5 μg or 125 μg per eye, of each modified u-PA polypeptide. The right eye received the test polypeptide and the left eye was injected with vehicle control. Animals were clinically observed (i.e., food consumption) and ophthalmic examinations were conducted. Ophthalmic examination included slit-lamp biomicroscopy and indirect ophthalmoscope observations, followed by color fundus photography or optical coherence tomography (OCT) prior to dosing (T=0) and on days 2, 8 and 15 post-dosing. All observations continued for up to 4 weeks or until resolution.

[0789] The no-observed-adverse-effect-level (NOAEL) was assessed for all animals. The NOAEL for animals administered a modified u-PA polypeptide with the sequence set forth in SEQ ID NO: 42 was ≥37.5 μg. No adverse effects were noted for animals administered a modified u-PA polypeptide with the sequence set forth in SEQ ID NO: 21; therefore, the NOAEL for animals administered a modified u-PA polypeptide with the sequence set forth in SEQ ID NO: 21 was ≥125 μg (equivalent to ≥375 μg/eye in man).

### Example 11

[0790] Calculations were performed to identify candidate immunogenic hotspots in the wild-type u-PA, a C122S variant of wild-type u-PA (SEQ ID NO:5) protease domain and exemplary u-PA variant protease domains to confirm that the mutations in the exemplary variants did not introduce any immunogenic hotspots. Calculations also were performed to compare the overall profile of hotspots for the variants of interest to a panel of comparison proteins.

[0791] Overview of Methods

[0792] An important step in the T-cell response to foreign proteins is the binding and presentation of constituent peptides (derived from the cleavage of the foreign protein) to any of a host of HLA complexes expressed in the antigen presenting cells. The identification of peptides, derived from a protein, that are predicted to bind to known HLAs can be used as an indication of possible hotspots in the sequence for eliciting a T-cell response. When considering a variant of a protein with known immunogenic properties, comparing the profile of predicted HLA-binders can help to identify whether the changes introduced any new immunogenic hotspots.

[0793] The profiles can be generated using publically available databases. For example, the publically available binding prediction service (NetMHCII 2.2server), Technical University of Denmark, was used to predict binding to HLAs. The NetMHCII 2.3 server predicts binding of peptides to HLA-DR, HLA-DQ, HLA-DP and mouse MHC class II alleles using artificial neuron networks. Predictions can be obtained for 25 HLA-DR alleles, 20 HLA-DQ, 9 HLA-DP, and 7 mouse H2 class II alleles. The prediction values are given in nM IC₅₀ values, and as a %-Rank to a set of 1,000,000 random natural peptides. Strong and weak binding peptides are indicated in the output.

[0794] The service was used to predict the binding affinity of all possible peptides of 15 contiguous amino acids in exemplary variants (SEQ ID NO:40, and SEQ ID NO:21), the wild-type protease domain (SEQ ID NO:2), and wild-type protease domain with C122S (SEQ ID NO:5) against a panel of 14 HLA-DR variants (see Table B, below) based on the primary sequence of the peptide. For each peptide/HLA pair, the NetMHCII server provides a predicted binding affinity, as well as a classification as a tight binder (K_{d}≤500), weak binder K_{d}≤50 nM), or non-binder (K_{d}>500 nM). For a protein sequence containing N amino acids, this results in a total of T=(N−14)×14 possible peptide-HLA binding pairs.

[0795] Using the binding predictions from the NetMHCII server, the results were used to identify possible hotspots in these protein sequences, based on areas where a number of candidate binding pairs were identified. These changes were compared with the known changes in the corresponding protein sequences.

[0796] For each protein, an overall binding score based on the number of predicted tight-binding peptide-HLA pairs (TB), the number of predicted weak-binding peptide-HLA pairs (WB), and the total number of peptide-HLA pairs considered (T) as:

Score=(TB+0.5*WB)/T

TABLE B
HLA-DR molecules included as possible binders
HLA-DRB1*1101
HLA-DRB1*0101
HLA-DRB1*0301
HLA-DRB1*0401
HLA-DRB1*0404
HLA-DRB1*0405
HLA-DRB1*0701
HLA-DRB1*0802
HLA-DRB1*0901
HLA-DRB1*1302
HLA-DRB1*1501
HLA-DRB3*0101
HLA-DRB4*0101
HLA-DRB5*0101

[0797] This score has shown good agreement with the in silico immunogenicity predictions generated by the company EpiVax (Providence, R.I.), which uses immunoinformatics and in vitro techniques to predict immunogenicity, when using a subset of 8 HLAs. This subset of 8 HLAs was used. The same calculations were performed on a panel of standard proteins to provide a comparison set against which to compare the u-PA variants.

[0798] Impact of Mutations on Predicted HLA Binding Profiles

[0799] The number of times a given sequence position for any of the variant u-PA protease domains were mapped for each-HLA complex at a K_{d} cutoff of 50 nM and 500 nM. The scale in each column is fixed, but differs between columns and compared with the wild-type polypeptides to assess whether the mutations altered the immunogenic profile. No significant differences among the polypeptides were observed.

[0800] Aggregate Immunogenicity Scores

[0801] To compute an aggregate immunogenicity score for each sequence, the total number of peptide-HLA binding pairs at each binding threshold across a panel of 8 HLAs (Table C) that previously have been validated by EpiVax (Providence, R.I.) to provide good agreement with published in silico immunogenicity scores. EpiVax is a company that uses immunoinformatics and in vitro techniques to predict immunogenicity. These values then were used to compute an overall score as described in the methods summary above.

TABLE C
HLA-DR subset used for overall immunogenicity score
HLA-DRB1*0101
HLA-DRB1*0301
HLA-DRB1*0401
HLA-DRB1*0701
HLA-DRB1*0802
HLA-DRB1*1101
HLA-DRB1*1302
HLA-DRB1*1501

[0802] The number of peptide-HLA binding pairs for the subset of 8 HLAs and the composite scores for uPA are shown below:

| Sequence ID | # tight (TB) | # weak (WB) | Total possible (T) | Score |
|---|---|---|---|---|
| 2 (WT) | 98 | 526 | 1888 | .191 |
| 5 (WTS) | 109 | 542 | 1888 | .201 |
| 40 | 107 | 528 | 1912 | .194 |
| 21 | 96 | 514 | 1912 | .185 |

[0803] The results indicate that the immunogenicity of the variants should not be different from the wild-type polypeptides. The results of the same analysis for a panel of comparator proteins is shown below:

| Sequence | # tight (TB) | # weak (WB) | Total possible (T) | Score |
|---|---|---|---|---|
| Follitropin-Beta | 13 | 120 | 920 | .079 |
| Fibrinogen-Alpha | 125 | 582 | 5040 | .083 |
| Insulin | 32 | 107 | 768 | .111 |
| Albumin | 192 | 743 | 4760 | .118 |
| Amylase | 210 | 711 | 3976 | .142 |
| Thrombopoietin | 266 | 609 | 2712 | .210 |
| Interferon-Beta | 175 | 353 | 1384 | .254 |
| Interleukin-11 | 233 | 316 | 1480 | .264 |

### Example 12

### Activation of Plasminogen by Wt- and Variant u-PA Polypeptides

[0804] The catalytic efficiency for activation of Glu-plasminogen by wt- and anti-C3 variants of u-PA polypeptides provided herein was tested as described below. Data from these experiments demonstrated that the anti-C3 u-PA variant proteins displayed significantly reduced activity towards plasminogen, a physiologically relevant substrate of wild type u-PA. In combination with data from Example 7, these data demonstrate that the anti-C3 u-PA polypeptides display not only substantially greater activity towards a “new” substrate, C3, but also substantially reduced activity towards the normal physiological substrate of wt u-PA.

[0805] Mutations introduced into the anti-C3 variants described in this application, therefore, have dramatically altered substrate specificity of the anti-C3 variant polypeptides compared with that of wt-u-PA.

Plasminogen Activation by Wt- and Anti-C3 Variant u-PA Polypeptides

### 1) Analysis Using a Single Time Point Reaction (37 C for 30 Minutes)

[0806] a) Reaction Conditions

[0807] Plasminogen activation activity was measured for wild type u-PA/C122S (SEQ ID NO:5) as well as anti-C3 u-PA polypeptide variants containing the mutations Y40Q/V41L/L97bA/C122S (SEQ ID NO:40) and R35Q/H37Y/R37aE/V38E/T39Y/V41R/D60aP/Y60bQ/T97aI/L97bA/H99Q/C122S/Y149R (SEQ ID NO:21). Protease concentrations in the reaction mixture were 25 nM (wt-u=PA) or 250 nM (anti-C3 u-PA variant) and substrate (i. e, Glu-plasminogen) concentration was 2.5 uM. The reaction volume was 20 uL and the reaction proceeded for 30 minutes at 37° C. Each reaction was terminated by adding of 2 uL of 1 M DTT and 7 uL of 4×sample buffer, and heating to 80° C. for 45 s. Terminated reaction mixtures were loaded into individual wells of a 4-12% BIS-TRIS gel and run in XT MES buffer at 200 V for 45 min and then stained with SimplyBlue SafeStain.

[0808] b) Measurement of Reaction Product (i.e., Plasmin)

[0809] Analysis of the stained SDS gel indicated that wt u-PA cleaved all the plasminogen present in the reaction, converting it to two-chain, active plasmin during the 30 minute incubation. By contrast, the activity of u-PA variant Y40Q/V41L/L97bA/C122S (seq ID 40) in this reaction was substantially lower than that of wt-u-PA while no plasminogen activation was observed by u-PA variant R35Q/H37Y/R37aE/V38E/T39Y/V41R/D60aP/Y60bQ/T97aI/L97bA/H99Q/C122S/Y149R in this reaction.

2) Kinetics of Glu-Plasminogen Activation by Anti-C3 u-PA Polypeptides

[0810] Kinetic analysis of the activation of Glu-plasminogen by wt- or anti-C3 uPA variant polypeptides was performed as described below. Activation reactions were performed at 37° C. in an I=0.16 M Hepes/NaCl/EDTA buffer containing 0.1% BSA. U-PA polypeptides were present at concentrations of 1 (wt) or 10 (variant) nM. Second-order rate constants (k_{cat}/KM) were derived from the fitted linear relationship of the initial reaction velocities for hydrolysis (by the reaction product plasmin) of the chromogenic substrate S-2251 (H-D-Val-Leu-Lys-pNA.2HCl) vs. the Glu-plasminogen (i.e., u-PA substrate) concentration (0-4 VM). See also Table 24.

| SEQ ID | | k_{cat}/K_{M} | | | | Ratio |
|---|---|---|---|---|---|---|
| NO. | Mutations | (M⁻¹s⁻¹) | ±S.D. | % CV | n= | to WT |
| 5 | C122S (WT) | 2.28E+04 | 2.62E+03 | 11.5% | 4 | 1 |
| 423 | V38D/L97bA/H99Q/C122S | 1.38E+03 | 1.79E+02 | 12.9% | 4 | 17 |
| 8 | F30Y/V38D/Y40H/V41R/L97bA/ | 4.59E+02 | 6.42E+01 | 14.0% | 4 | 50 |
| | H99Q/C122S/M157K | | | | | |
| 254b* | C[4]S/F30Y/R35W/R36H/H37E/ | 9.91E−01 | 1.88E+00 | 190.0% | 4 | 23034 |
| | V38E/T39W/Y40H/V41R/Y60bH/ | | | | | |
| | T97aI/L97bA/H99Q/C122S/ | | | | | |
| | Y149R/M157K/Q192A | | | | | |

### C4S Mutation is not in the Protease Domain

[0811] Comparison among 15 variants showed the results in the Table 24 appended below labeled “Activation of Glu-Plasminogen by anti-C3 u-PA Variants.”

[0812] For Table 24:

[0813] Glu-plasminogen was activated by C122S uPA or selected uPA variants at protease concentrations of 1 nM or 10 nM protease

[0814] Reactions were carried out at 37° C. in an I=0.16 M Hepes/NaCl/EDTA buffer containing 0.1% BSA

[0815] Second-order rate constants (k_{cat}/KM) were derived from the fitted linear relationship of the initial reaction velocities for hydrolysis of the chromogenic substrate S-2251 (H-D-Val-Leu-Lys-pNA 2HC1) vs. the Glu-plasminogen concentration (0-4 μM).

### Example 13

### Exemplary u-PA Protease Domain Mutants Cleavage of Complement Protein C3 in Cynomolgus Monkey Vitreous Humor

[0816] Exemplary mutants are shown in Table 23 below with reference to the WT u-PA protease domain set forth in SEQ ID NO: 5. Shaded cells indicate that the modified u-PA polypeptides are mutated at this residue when compared to the reference u-PA polypeptide set forth in SEQ ID NO: 5. Unshaded cells indicate that the modified u-PA polypeptides contain the same amino acid as the reference u-PA polypeptide set forth in SEQ ID NO: 5. The activity of the modified u-PA polypeptides was determined by cleavage of the substrate complement protein C3 as detailed and presented in Example 2 and are presented as the residual levels of C3 (nM) after u-PA treatment. Cleavage of C3 by the modified u-PA polypeptides was performed in purchased cynomolgus monkey vitreous humor or Phosphate Buffered Saline (PBS) control as detailed in Example 3. The results set forth in Table 23, below, show that the modified u-PA polypeptides exhibit greater activity against C3 compared to the reference u-PA protease domain, whose sequence is set forth in SEQ ID NO:5. The activity % in vitreous humor and PBS show the percentage of remaining activity after 7 days. The modified u-PA polypeptides are relatively stable compared to the reference wild-type protease domain of SEQ ID NO:5, with some showing more stability than others. Therapeutic candidates, including those in the table below, are those having high C3 cleavage activity, and greater stability, particularly in vitreous humor.

Among other things, these data and the other data show that:

[0817] R35Q: this mutation increased the intrinsic anti-C3 activity (i.e., in buffer) by approximately 2.7-fold and by approximately 4.3-fold in the presence of 80% human plasma

[0818] H37Y: this mutation increased anti-C3 activity by approximately 2.4-2.5-fold in buffer and in the presence of 80% human plasma

[0819] R37aE: this mutation decreased the intrinsic anti-C3 activity by approximately 3.2-fold; however, in the presence of 80% human plasma it had no effect on anti-C3 activity

[0820] V38E: this mutation improved the stability of the protein in buffer and vitreous humor and improved the anti-C3 activity in 80% human plasma by ˜1.5-fold

[0821] T39Y: This mutation increased the intrinsic anti-C3 activity and the anti-C3 activity in 80% human plasma by approximately 7.5-8.5-fold

[0822] V41R: This mutation increased the intrinsic anti-C3 activity and the anti-C3 activity in 80% human plasma by approximately 25-27-fold

[0823] D60aP: This mutation increased the intrinsic anti-C3 activity and the anti-C3 activity in 80% human plasma by approximately 1.2-1.6-fold

[0824] Y60bQ: This mutation decreased the intrinsic anti-C3 activity by approximately 1.7-fold and decreased the stability of the protein in vitreous after incubation for 7 days at 37° C. by ˜1.4-fold; but in the presence of 80% human plasma, it increased anti-C3 activity by approximately 1.1-fold

[0825] T97aI: This mutation increased the intrinsic anti-C3 activity and anti-C3 activity in the presence of 80% human plasma by approximately 1.2-1.3-fold

[0826] L97bA: This mutation increased anti-C3 activity by approximately 6.4-8.2-fold in buffer and in 80% human plasma

H99Q: This mutation increased anti-C3 activity by approximately 2.9-4.8-fold in buffer and 80% human plasma
Y149R: This mutation decreased anti-C3 activity by approximately 1.6-2.1-fold in buffer and 80% human plasma.

[0827] Similar results were achieved for the replacements in lower mutation load modified u-PA polypeptides that contain: I41D/C122S/G151N/Q192T (see, e.g., the modified u-PA polypeptide whose sequence is set forth in SEQ ID NO:40, and also full-length and precursor and mature forms that contain these replacements).

[0828] Data indicate that the modified u-PA provided herein cleave and inactivate C3 in a variety of species. For example, cleavage of human C3 to inactivate it can be between residues 740 and 741 (SEQ ID NO:47):

| | |
|---|---|
| Q H A R ↓ A S H L | 737-744 |
| P4 P3 P1 ↓ P1′ P4′. | |

### Example 14

### Cloning, Expression and Preparation of u-PA-Human Serum Albumin (HSA) Fusion Proteins

[0829] A. Cloning of the u-PA-HSA Fusion Polypeptide

[0830] A construct for expression of a u-PA-HSA fusion protein was generated (SEQ ID NO: 1015). The u-PA-linker-HSA fragment was assembled from synthetic oligonucleotides and/or PCR products and cloned into the pcDNA3.4-TOPO vector (Invitrogen; Cat. No. A14697) for expression under control of the human cytomegalovirus (CMV) immediate-early promoter/enhancer or a proprietary expression vector (Lake Pharma). A secretion signal sequence (SEQ ID NO:999 (METDTLLLWVLLLWVPGSTG)) was cloned upstream of the u-PA N-terminal domain (amino acids 1-158 of SEQ ID NO: 3), and an exemplary modified u-PA protease domain (set forth in SEQ ID NO:987), and linked via a linker (SEQ ID NO: 1002 (GGSSGG)) to the coding region of human serum albumin (HSA; SEQ ID NO: 991):

[sequence omitted]

[0831] The construct includes the signal peptide (amino acids 1-20), the u-PA N-terminal domain, the modified protease domain of SEQ ID NO:21, except with C at position 122 (set forth in SEQ ID NO: 987), the GS linker (GGSSGG, SEQ ID NO: 1002) followed by the HSA coding region. The complete construct sequence, set forth in SEQ ID NO: 1015, is:

METDTLLLWVLLLWVPGSTGSNELHQVPSNCDCLNGGTCVSNKYFSN
IHWCNCPKKFGGQHCEIDKSKTCYEGNGHFYRGKASTDTMGRPCLPW
NSATVLQQTYHAHRSDALQLGLGKHNYCRNPDNRRRPWCYVQVGLKP
LVQECMVHDCADGKKPSSPPEELKFQCGQKTLRPRFKIIGGEFTTIE
NQPWFAAIYQRYEGGSEYYRCGGSLISPCWVISATHCFIPQPKKEDY
IVYLGRSRLNSNTQGEMKFEVENLILHKDYSADIAAQHNDIALLKIR
SKEGRCAQPSRTIQTICLPSMYNDPQFGTSCEITGFGKENSTDRLYP
EQLKMTVVKLISHRECQQPHYYGSEVTTKMLCAADPQWKTDSCQGDS
GGPLVCSLQGRMTLTGIVSWGRGCALKDKPGVYTRVSHFLPWIRSHT
KEENGLALGGSSGGDAHKSEVAHRFKDLGEENFKALVLIAFAQYLQQ
CPFEDHVKLVNEVTEFAKTCVADESAENCDKSLHTLFGDKLCTVATL
RETYGEMADCCAKQEPERNECFLQHKDDNPNLPRLVRPEVDVMCTAF
HDNEETFLKKYLYEIARRHPYFYAPELLFFAKRYKAAFTECCQAADK
AACLLPKLDELRDEGKASSAKQRLKCASLQKFGERAFKAWAVARLSQ
RFPKAEFAEVSKLVTDLTKVHTECCHGDLLECADDRADLAKYICENQ
DSISSKLKECCEKPLLEKSHCIAEVENDEMPADLPSLAADFVESKDV
CKNYAEAKDVFLGMFLYEYARRHPDYSVVLLLRLAKTYETTLEKCCA
AADPHECYAKVFDEFKPLVEEPQNLIKQNCELFEQLGEYKFQNALLV
RYTKKVPQVSTPTLVEVSRNLGKVGSKCCKHPEAKRMPCAEDYLSVV
LNQLCVLHEKTPVSDRVTKCCTESLVNRRPCFSALEVDETYVPKEFN
AETFTFHADICTLSEKERQIKKQTALVELVKHKPKATKEQLKAVMDD
FAAFVEKCCKADDKETCFAEEGKKLVAASQAALGL.

B. Preparation of u-PA-HSA Fusion Polypeptides

[0832] 1. Transformation and Expression of u-PA-HSA Fusion Polypeptides

[0833] DNA encoding the modified u-PA-HSA fusion polypeptide was cloned into the pcDNA3_4 expression vector (Thermo Fisher) or a proprietary vector (Lake Pharma)C-terminal to the secretion signal sequence as detailed in Section A. Modified u-PA-HSA fusion proteins were subsequently expressed in a 1 L volume of expression media for 6 days in HEK expi293 or expiCHO expression cells at ThermoFisher or the proprietary TunaCHO™ cell line at Lake Pharma.

[0834] 2. Affinity Purification of u-PA-HSA Fusion Polypeptides

[0835] The zymogen form of the modified u-PA-HSA fusion proteins were purified using the system sold as the CaptureSelect™ Human Albumin Affinity Matrix system (ThermoFisher Scientific; Cat. No. 19129701L or 19127005) according to the manufacturer's instructions. A column was prepared by adding approximately 10 mL of CaptureSelect™ Affinity Matrices resin (ThermoFisher) to the column. After the storage solution was allowed to flow through the column, 10 column volumes (CVs) of PBS (137 mM NaCl, 2.7 mM KCl, 10 mM Na₂HPO₄, 2 mM KH₂PO₄, pH 7.4) was added to wash the resin. Next, the expression harvests containing the u-PA-HSA fusion proteins were applied to the column and subsequently washed with 5-10 CVs of PBS. Bound u-PA-HSA fusion proteins were eluted with 10 CVs of elution buffer (20 mM Tris, 2 M MgCl₂, pH 7.0). The column was later stripped with 10 CVs of glycine (0.2 M, pH 3.0) and neutralized with 10% Tris-HCl (1.5 M, pH 7.4) and re-equilibrated in PBS. Samples of flow through and elution steps were collected and analyzed on reduced and non-reduced SDS PAGE gel electrophoresis to evaluate sample purity. The u-PA-HSA fusion proteins were dialyzed for 16 hours into PBS at 4° C.

[0836] 3. Plasmin Activation of Modified u-PA-HSA Fusion Polypeptides

[0837] Plasmin selectively cleaves a single bond in wild-type u-PA and other u-PA fusion polypeptides having the wild-type u-PA activation sequence to activate the u-PA-HSA zymogen and form a two-chain u-PA-HSA fusion protein, linked via a disulfide with the C-terminal active protease domain tethered to the N-terminal u-PA domain by a disulfide linkage. For these experiments the construct used has the sequence set forth in SEQ ID NO: 1015, which contains the modified u-PA polypeptide of SEQ ID NO:21, except that the C122S, by chymotrypsin numbering, is C122C to provide a free cysteine, and the signal sequence (residues 1-20 of SEQ ID NO:1015) is not included. Following activation the resulting product has two chains (with reference to SEQ ID NO: 1015): an A chain that has residues 21-178, and a B chain that has residues 179-1022, u-PA (residues 179-431), linker (residues 432-437), and HSA (residues 438-1022). The A and B chains are linked by a disulfide bond between C168 and C299 (corresponding to C122 by chymotrypsin numbering).

[0838] The HSA domain remains conjugated through the GGSSGG linker to the C-terminus of the protease domain. Activation followed the following procedure: a plasmin-agarose resin slurry (Molecular Innovations; Cat. No. HPL-1) was prepared by washing the resin with 1×PBS, 3 times. Subsequently, 200 μL of resin slurry in 1×PBS per milligram of u-PA fusion polypeptide was added to a solution containing the dialyzed u-PA-HSA fusion polypeptide in PBS. “Activation” of the u-PA polypeptide zymogen was accomplished by gently shaking the protein/resin solution for 3 hours at room temperature. The modified u-PA-HSA polypeptide zymogen was thenceforth fully converted into the corresponding active modified u-PA-HSA protease.

[0839] The activated modified u-PA-HSA polypeptides were recovered from the plasmin resin using 0.2 μm spin filters (2.0 mL capacity) and centrifuging to recover activated modified u-PA-HSA from the plasmin resin as per the manufacturer's instructions. To maximize recovery, additional filtration techniques may be envisioned (as opposed to spinning down the resin and recovering the supernatant by pipette extraction). Other low-protein binding filtration apparatus also can be used for further filtration of the resin. Activated u-PA-HSA fusion proteins were stored at 4° C. or frozen in aliquots. Confirmation of the complete activation step was visualized by SDS-PAGE under reducing conditions to separate the N-terminal domain from the protease domain HSA fusion conjugate.

[0840] 4. Inhibition of Activated Modified u-PA-HSA Fusion Proteins

[0841] For some experiments it was desired to use a catalytically inactive form of the u-PA-HSA fusion polypeptide (set forth as residues 21-1022 of SEQ ID NO:1015, as discussed above; see e.g., SEQ ID NO: 1019). To generate a protein designated as inhibited modified u-PA-HSA (u-PA-HSAi), activated modified u-PA-HSA (u-PA-HSAa) was incubated with an irreversible active site inhibitor, Glu-Gly-Arg-Chloromethylketone (EGR-CMK), to prevent any autocatalysis of the modified u-PA-HSA polypeptides or inactivation/cleavage during in vivo experiments (see e.g., Examples 15 and 16). To prepare the u-PA-HSAi, lyophilized EGR-CMK (Molecular Innovations; Cat. No. GGACK) was reconstituted to 100 mM in 10 mM HCl. Concentrated EGR-CMK was added to the activated modified u-PA-HSA sample (u-PA-HSAa) at the stock concentration to reach a final inhibitor concentration of 1 mM EGR-CMK inhibitor in 1×PBS, and the mixture was allowed to incubate for 1 hour at RT.

[0842] To assess whether the u-PA-HSAa was fully inhibited, the degradation of modified u-PA-HSAi was compared to modified u-PA-HSAa in a stability experiment. Briefly, modified u-PA-HSAi and modified u-PA-HSAa were incubated for 0 hours, 1 day, or 7 days at 37° C. Modified u-PA-HSAi and u-PA-HSAa degradation was visually monitored by reduced and non-reduced SDS-PAGE gel electrophoresis under reduced and non-reduced conditions. Bands were visualized by Comassie or other similar commercially available stain. The results demonstrate that preincubation with the inhibitor stabilizes the polypeptide, as no degradation products were observed for the modified u-PA-HSAi at any time point up to 7 days, compared to the observed degradation of modified u-PA-HSAa after incubation for 1 day or 7 days at 37° C.

[0843] 5. Purification of u-PA-HSAa and u-PA-HSAi Polypeptides after Activation

[0844] During the final purification round, active and inhibited modified u-PA-HSA polypeptides were isolated from high and low molecular weight impurities using size exclusion chromatography. Purification excluded a high molecular weight species that eluted as a discrete peak prior to the main u-PA-HSA peak. The high molecular weight species was not further analyzed, however could represent aggregates or multimers that formed during the expression or activation steps in the process. A secondary, low molecular weight species thought to be free from albumin generated during expression or activation was also eliminated.

[0845] Purification proceeded as follows; a ˜300 μL sample of modified u-PA-HSAi (0.8 mg) or a ˜400 μL sample of modified u-PA-HSAa (0.8 mg) was loaded onto a size-exclusion chromatography column (HiPrep 16/60 Sephacryl S-200 HR; GE Heathcare, Cat. No. GE17-1166-01) in PBS at pH 7.0 at a flow rate of 0.5 mL/min. Proteins were generally purified according to manufacturer instructions for the resin (GE Healthcare) with the main peak containing modified u-PA-HSAi or u-PA-HSAa retained.

[0846] The quality of the preparations and extent of separation was further assessed by reducing and non-reducing SDS-PAGE gel electrophoresis. Elution fractions of modified u-PA-HSAi or u-PA-HSAa polypeptide sample were loaded in each “lane” of a 12-well non-reducing SDS-PAGE gel and run at 40V until the bands were sufficiently distinguishable and the various sized protein species were visualized by silver staining to improve sensitivity over the standard Coomassie stain. Fractions containing single bands migrating at the expected molecular weight of 75 kDa were pooled and snap-frozen in liquid nitrogen at a final concentration of approximately 2 mg/mL and stored at −80° C. until use. The final concentration was determined by absorption at 280 nM using a NanoDrop spectrophotometer. Protein size and expression was later confirmed by Comassie stain, and SDS-PAGE. The quality of individual u-PA-HSA polypeptide samples was further assessed by activity assays and mass spectroscopy.

### Example 15

### Modified u-PA Protease Domain and Modified u-PA-HSA Fusion Protein Pharmacokinetic Evaluation Following Intravitreal Injection

[0847] The pharmacokinetics and overt ocular toxicity of a modified u-PA-HSA fusion polypeptide was assessed. The fusion protein contains ae modified u-PA polypeptide protease domain (SEQ ID NO:987, which is SEQ ID NO:21, except that the C122S is C122C), as described above in Example 14. The fusion protein has the sequence set forth in SEQ ID NO:1019, which is residues 21-1022 of SEQ ID NO: 1015. As described in Example 14, the protease domain of the modified u-PA is set forth in SEQ ID NO:987. The pharmacokinetic profile of activated and inhibited modified u-PA-HSA fusion proteins (SEQ ID NO:1015) were assessed in vivo in Dutch Belted rabbits and compared to that of the pharmacokinetic profile of the modified u-PA protease domain only as set forth in SEQ ID NO:21. Eight rabbits were assigned to each of three treatment groups (group 1: modified u-PA-HSAa; group 2: modified u-PA-HSAi; group 3: modified u-PA protease domain (SEQ ID NO: 21)). Study animals were administered 50 μL of either 2.1 mg/mL of modified u-PA-HSAi and u-PA-HSAa, or 1.15 mg/mL of modified u-PA (SEQ ID NO: 21), per eye, via intravitreal injection (IVT). For the group treated with the modified u-PA containing the modified protease, the right eye received the modified u-PA polypeptide, and the left eye was injected with PBS as the vehicle control (PBS). The table below summarizes the groups and conditions, and assessments performed:

| | | | | Irritation | | Fluids and |
|---|---|---|---|---|---|---|
| | | Concen- | | scoring | Terminal | Tissues |
| | | tration | Dose/ | method/ | Time | Collected |
| Group | Formulation | (mg/mL) | Route | timing | points | (OS and OD)^{*} |
| 1 (n = 8) | modified u- | 2.1 | 50 μL/eye | Draize/ | 1, 3, 7, and | Aqueous humor, |
| | PA-HSA | mg/mL | intravitreal | prior to | 14 days post- | vitreous humor, |
| | Activated | | | euthanasia | dose | retina, choroid, |
| | (u-PA-HSAa) | | | | (n = 2/time | plasma |
| | | | | | point) | |
| 2 (n = 8) | modified u- | 2.1 | 50 μL/eye | Draize/ | 1, 3, 7, and | Aqueous humor, |
| | PA-HSA | mg/mL | intravitreal | prior to | 14 days post- | vitreous humor, |
| | Inhibited | | | euthanasia | dose | retina, choroid, |
| | (u-PA-HSAi) | | | | (n = 2/time | plasma |
| | | | | | point) | |
| 3 (n = 8) | Modified u- | 1.15 | 50 μL left | Draize/ | 1, 3, and | Aqueous humor, |
| | PA Protease | mg/mL | eye/intra- | prior to | 7 days | vitreous humor, |
| | Domain | | vitreal | euthanasia | postdose | retina, choroid, |
| | (SEQ ID NO: | | Right eye/ | | (n = 2-3/ | plasma |
| | 21) | | control | | timepoint) | |

^{*}OS and OD refer to the right and left eyes, respectively

[0848] 1. Modified u-PA and Modified u-PA-HSA Fusion Protein Occular Tolerability

[0849] During the dosing period and prior to euthanasia, clinical and ocular observations were conducted and body weight were recorded. Ocular exams were performed on both eyes at 1, 3, 7, and 14 days (Groups 1 and 2) or at 1, 3, and 7 days (Group 3) following dosing, and ocular irritation was scored using the Draize scale. The Draize scoring system (Draize et al., (1944) J Pharm Exper Ther 82 (3) 377-90) assesses eye irritation in the cornea, iris and conjunctiva and provides criteria for scoring irritation on a 0-2 or 0-4 scale. A score of “0” indicates that the cornea, iris or conjunctiva is normal. At all timepoints, ocular irritation was scored a 0 as assessed using the Draize criteria for all animals except one rabbit with 2 scores of “1” indicating “redness” where the “vessels are definitely injected above normal” and “chemosis” with “swelling above normal” of the conjunctiva. These “1” scores were observed for one rabbit in Group 2 (u-PA-HSAi) within a few hours following the intravitreal administration of u-PA-HSAi at day 1. Most importantly there was no toxicity observed after intravitreal administration of the modified u-PA and modified u-PA-HSA activated fusion proteins.

[0850] 2. Modified u-PA and Modified u-PA-HSA Fusion Protein Pharmacokinetics

[0851] For the determination of modified u-PA and modified u-PA-HSA polypeptide concentrations (nM) and pharmacokinetic parameters, terminal samples of ocular tissues and fluids were collected after enucleation of both eyes on days 1, 3, 7 and 14 using two animals per time point. Following euthanasia, both eyes of each rabbit were harvested and dissected for collection of ocular tissues and fluids (aqueous humor (AH), vitreous humor (VH), retina, and choroid)) for assessment of u-PA and u-PA-HSA expression and activity. Following collection, weighed amounts of rabbit vitreous humor, retina, and choroid were homogenized in impact resistant microtubes (USA Scientific) containing 2.8 mm ceramic beads. For VH, retina, and choroid tissues, a consistent aliquot of phosphate buffered saline per milligram of tissue was added to each tube. Retina and choroid samples were diluted 9:1 (diluent volume: tissue volume) and VH samples were diluted 4:1 (diluent volume: VH volume) with phosphate buffered saline. Samples were homogenized (Precellys® homogenizer) at 0 to 10° C., at 5500 rpm for 3×30 second cycles with 20 second pauses between cycles until thoroughly homogenized.

[0852] The concentration as determined by ELISA (nM) and activity (nM) of modified u-PA and modified u-PA-HSA polypeptides in VH was determined using an ELISA and activity assay, respectively. For the concentration determination, the anti-u-PA sandwich ELISA was carried out as follows: the capture antibody PA1-36166 (Invitrogen) was coated on ELISA plates overnight at 4° C. or 2 hours at RT at a concentration of 1.0 ug/mL in 100 mM carbonate buffer, pH 9.5. The plates were subsequently washed 3× with PBST (1×PBS containing tween) followed by blocking with 1% BSA in PBS-tween overnight at 4° C. or 2 hours at RT. 50 μL of each sample were incubated for for 30 mins at RT with shaking followed by washing 3× with PBS and incubation with the detection antibody PA1-36015 (Invitrogen at 0.25 ug/mL for 30 mins). Wells were again washed and subsequently incubated with HRP conjugated anti Goat antibody (Rockland) at 1:30,000 dilution for 30 min with shaking at RT. After washing 6× with PBST, bound modified u-PA and modified u-PA-HSA polypeptides were visualized by detection with 1-step TMB (34028, Thermo), quenching with 2N sulfuric acid prior to reading the absorbance at 450 nm.

[0853] Quantification of the modified u-PA and modified u-PA-HSA polypeptides in VH by activity was followed using an assay based on the hydrolysis of a quenched-fluorescence peptide substrate (FRET) and calibrated to a standard curve of modified u-PA polypeptides of known active concentration. This assay uses a FRET peptide substrate based on the cleavage sequence of human complement 3 (C3). The sequence of the peptide is RQHAR/ASHL, where the “/” indicates the cleavage site. The N-terminal side of the peptide is labeled with a DABCYL fluorophore, and the C-terminal side is labeled with an EDANS fluorophore. Cleavage of the peptide separates the EDANS/DABCYL FRET pair to generate a fluorescent signal, which is measured in a multi-well fluorescence plate reader.

[0854] The assay was conducted as follows: test samples are typically diluted to a minimum required dilution of 1:20 in assay buffer (100 mM Tris, 50 mM NaCl, 0.01% Tween-80, pH 7.4). The diluted samples are further diluted 1:2 with 80 μM FRET substrate in a 96-well plate. Immediately upon the combination of diluted test samples and substrate, the fluorescence signal following FRET substrate hydrolysis was evaluated in a fluorescence plate reader with measurements every 30 seconds for 2 hours. Enzymatic hydrolysis of the FRET peptide substrate generates an EDANS fluorescent product. The rate of generation of fluorescence intensity is interpolated against an EDANS standard curve to yield the EDANS product generation rate. The specific activity may be calculated in two ways. First, the product generation rate is multiplied by the dilution factor to yield a volumetric specific activity in units of nmol product per minute of reaction per mL of sample (nmol/min/mL). The volumetric specific activity indicates the total amount of active enzyme in the sample. Secondly, the specific activity is calculated by dividing the volumetric specific activity by the sample enzyme concentration to yield an enzyme specific activity in units of nmol product per minute of reaction per mg of enzyme (nmol/min/mg). For testing to determine the apparent protease concentration of unknown samples (e.g., in vivo PK samples), the volumetric specific activity of the sample (nmol/min/mL) is divided by the enzyme specific activity of the control modified u-PA or modified u-PA-HSA polypeptide (nmol/min/mg) to yield the apparent protease concentration in the sample (mg/mL).

[0855] Data for each eye and animal are provided in the Table below. The concentrations obtained for each eye were averaged per animal. Then the drug concentrations for each animal was averaged at each time point to compensate for the inter-animal variability. The means at each time point were computed and presented in the Table below. The resulting data then were subjected to the following analytical methodology: First, a semi-parametric piecewise robust regression approach developed by Lee et al., (see, Lee et al., (1990) J. Lab Clin. Med. 115:745-748; and Lee et al. (1997) “The use of robust regression techniques to obtain improved coagulation factor half-life estimates. XVIth Congress of the International Society for Thrombosis and Hemostasis,” Florence, Italy) was used for computing the half-life. It is a compartmental model. The data were evaluated using the program Demitasse, which has been validated and used for FDA submissions. For analyses of area under the time curve (AUC) and the other PK parameters, a non-compartmental model based on the trapezoidal rule was used. The PK parameters were calculated and are set forth in the tables below.

TABLE

| | | Drug | Drug |
|---|---|---|---|
| | time | Concentration | Concentration |
| Condition | point (d) | by ELISA (nM) | by Activity (nM) |
| Modified u-PA- | 0 | 842.90 | n.d. |
| HSAi | 1 | 385.08 | n.d. |
| | 1 | 122.79 | n.d. |
| | 1 | 289.90 | n.d. |
| | 1 | 270.36 | n.d. |
| | 3 | 289.25 | n.d. |
| | 3 | 257.84 | n.d. |
| | 3 | 254.54 | n.d. |
| | 3 | 265.59 | n.d. |
| | 7 | 120.94 | n.d. |
| | 7 | 138.35 | n.d. |
| | 7 | 144.15 | n.d. |
| | 7 | 113.22 | n.d. |
| | 14 | 30.13 | n.d. |
| | 14 | 27.53 | n.d. |
| | 14 | 36.28 | n.d. |
| | 14 | 25.37 | n.d. |
| Modified u-PA- | 0 | 842.90 | 842.90 |
| HSAa | 1 | 368.35 | 749.14 |
| | 1 | 264.23 | 344.78 |
| | 1 | 311.69 | 460.72 |
| | 1 | <LOD | 0.35 |
| | 3 | 199.27 | 505.84 |
| | 3 | 168.21 | 283.60 |
| | 3 | 132.80 | 179.47 |
| | 3 | 181.28 | 239.77 |
| | 7 | 64.47 | 156.92 |
| | 7 | 61.08 | 82.45 |
| | 7 | 73.70 | 98.58 |
| | 7 | 51.94 | 51.25 |
| | 14 | 9.69 | 31.96 |
| | 14 | 7.55 | 72.49 |
| | 14 | 5.35 | 15.63 |
| | 14 | 6.79 | 10.38 |
| Modified u-PA | 0 | 1838.69 | 1838.69 |
| (SEQ ID NO. 21) | 1 | 214.47 | 203.44 |
| | 1 | 222.15 | 251.46 |
| | 1 | 182.63 | 183.70 |
| | 3 | <LOD | 6.48 |
| | 3 | 130.01 | 110.85 |
| | 3 | 98.91 | 75.91 |
| | 7 | 21.55 | 25.24 |
| | 7 | 31.49 | 19.44 |

*Cells in bold were outside limits of detection and/or considered outliers or excluded based on an outlier test

TABLE

| Study | Modified u-PA- | Modified u-PA- | Modified u-PA |
|---|---|---|---|
| day | HSAi (ELISA) | HSAa (ELISA) | (ELISA) |
| 1 | 267.03 | 314.76 | 206.42 |
| 3 | 266.81 | 170.39 | 114.46 |
| 7 | 129.16 | 62.80 | 26.52 |
| 14 | 29.83 | 7.35 | n/a |
| Study | Modified u-PA- | Modified u-PA- | Modified u-PA |
| day | HSAi (ELISA) | HSAa (ELISA) | (Activity) |
| 1 | n.d. | 388.75 | 212.86 |
| 3 | n.d. | 302.17 | 64.41 |
| 7 | n.d. | 97.30 | 22.34 |
| 14 | n.d. | 32.61 | n/a |

| | ELISA Results (t-half | Activity Results (t-half |
|---|---|---|
| Test article | terminal-days) | terminal-days) |
| Modified u-PA-HSAi | 3.42 (MRT = 5.56) | n.d. |
| Modified u-PA-HSAa | 2.42 (MRT = 3.79) | 3.27 (MRT = 4.71) |
| Modified u-PA | 2.01 (MRT = 3.29) | 1.95 (MRT = 3.01) |
| (SEQ ID NO: 21) | | |

[0856] Based on ELISA and activity assays, the modified protease domain of u-PA (containing the modified u-PA polypeptide of SEQ ID NO:21) has a half-life of approximately 2 days. Fusion to HSA, increases the half-life of the protein. The activated modified u-PA-HSAa had a half-life of 2.42 days and 3.27 days, as measured by ELISA and activity, respectively. Half-life was increased for u-PA-HSA subjected to the inhibition protocol with an ELISA-determined half-life of 3.42 days. Thus, fusion of u-PA to HSA increases the protein half-life in vivo, and the fusion protein retains protease activity in vivo.

### Example 16

### Cloning, Expression and Preparation of u-PA Fusion Proteins

[0857] A. Cloning of u-PA Fusion Polypeptides

[0858] u-PA fusion proteins were generated with fusion partners at either the N-terminus or C-terminus.

[0859] 1. Exemplary Fusion Proteins

[0860] Several alternate constructs for expression of u-PA fusion proteins were generated (described below). For example, N-terminal fusion proteins were generated (see, e.g., FIG. 2A). The constructs contained (from N-terminal to C-terminal): (1) a secretion signal (e.g., mouse Ig kappa chain V-III region (IgGκ) (SEQ ID NO: 999); (2) a fusion partner (e.g., IgG1 Fc (SEQ ID NO: 992)); (3) linker, such as AGS (SEQ ID NO: 1003); to the (4) wild-type u-PA activation sequence (SEQ ID NO: 997; amino acids 167-178 of SEQ ID NO: 1); and (5) the modified u-PA protease domain (SEQ ID NO: 987). An example of an N-terminal fusion protein is set forth in SEQ ID NO: 1004.

[0861] C-terminal fusion proteins also were generated (see, e.g., FIG. 3). In some examples the constructs contained (from N-terminal to C-terminal): (1) a secretion signal (mouse Ig kappa chain V-III region (IgGκ) (SEQ ID NO: 999); or human Interleukin-2 (hIL2) (SEQ ID NO: 1000)); (2) the wild-type u-PA activation sequence (SEQ ID NO: 997 or 998), furin activation sequence (SEQ ID NO: 995, 996, or 1041), or no activation sequence; (3) the modified u-PA protease domain (SEQ ID NO: 987 or 21) or the wild-type u-PA protease domain (SEQ ID NO: 2 or 5); (4) a linker (SEQ ID NO: 1002 or 1003); and (5) a fusion partner (i.e., IgG1 Fc (SEQ ID NO: 992); human serum albumin (HSA) (SEQ ID NO: 991); cFv that binds to Collagen IIm (C2scFv) (SEQ ID NO: 993); or an Hyaluronic acid binding domain (HABD)(SEQ ID NO: 994)). Examples of C-terminal fusion proteins are set forth in SEQ ID NOs: 1006-1010, 1012, 1013, 1016, and 1040 (see e.g., FIGS. 3A and 3B).

[0862] C-terminal fusion proteins containing the u-PA N-terminal region also were generated. The constructs contained (from N-terminal to C-terminal): (1) a secretion signal (mouse Ig kappa chain V-III region (IgGκ); SEQ ID NO: 999); (2) the wild-type u-PA N-terminal region (amino acids 21-178 of SEQ ID NO: 1 or SEQ ID NO: 1042); (3) an activation sequence of u-PA (SEQ ID NO: 997 or 998) or a furin activation sequence (SEQ ID NO: 995, 996, or 1041); (4) the modified u-PA catalytic domain (SEQ ID NO: 987 or SEQ ID NO:5, except with C122, by chymotrypsin numbering, or SEQ ID NO: 21); (5) a linker (SEQ ID NO: 1002 or 1003); and (6) a fusion partner (i.e., IgG1 Fc (SEQ ID NO: 992); human serum albumin (HSA) (SEQ ID NO: 991)). Examples of C-terminal fusion proteins are set forth in SEQ ID NOs: 1011, 1014, 1015 and 1036 (see e.g., FIG. 3C). See, also SEQ ID NO:1010, which contains a furin activation sequence in place of the u-PA

[0863] Fusion proteins containing SUMO at the N-terminus and the fusion partner at the C-terminus also were generated. The constructs contained (from N-terminal to C-terminal): (1) a secretion signal (mouse Ig kappa chain V-III region (IgG) (SEQ ID NO: 999)); (2) a HIS linker and SUMO sequence (SEQ ID NO: 990); (3) the modified u-PA catalytic domain (SEQ ID NO: 987); (4) a linker (SEQ ID NO: 1002); and (5) a fusion partner (i.e., IgG1 Fc (SEQ ID NO: 992); or human serum albumin (HSA) (SEQ ID NO: 991)). Examples of C-terminal fusion proteins are set forth in SEQ ID NOs: 1016 and 1017.

[0864] A full-length u-PA protein that was not fused to a fusion partner was generated as a control (see, e.g., FIG. 2B). The construct contained (from N-terminal to C-terminal): (1) secretion signal (mouse Ig kappa chain V-III region (IgGκ) (SEQ ID NO: 999)); (2) the N-terminal domain of u-PA (SEQ ID NO:1040; amino acids 21-166 of SEQ ID NO: 1); (3) a u-PA activation sequence (SEQ ID NO: 997); and (4) the modified u-PA protease domain (SEQ ID NO: 987). An example of a full-length u-PA protein is set forth in SEQ ID NO: 1005. The following is a summary of the constructs that were generated:

| SEQ ID | Signal | Fusion | Activation | Fusion partner | Protease domain |
|---|---|---|---|---|---|
| NO: | Sequence | partner | Sequence | location | of u-PA |
| 1004 | IgGκ | IgG1 Fc | u-PA with Cys | N-terminus | SEQ ID NO: 987 |
| 1005 | IgGκ | No fusion | Full-length uPA | No fusion | SEQ ID NO: 987 |
| | | partner | w/Cys | partner | |
| 1006 | hIL2 | IgG1 Fc | No Activation | C-terminus | SEQ ID NO: 21 |
| | | | Sequence | | |
| 1007 | hIL2 | HSA | No Activation | C-terminus | SEQ ID NO: 21 |
| | | | Sequence | | |
| 1008 | hIL2 | C2 scFv | No Activation | C-terminus | SEQ ID NO: 21 |
| | | | Sequence | | |
| 1009 | hIL2 | HABD | No Activation | C-terminus | SEQ ID NO: 21 |
| | | | Sequence | | |
| 1010 | IgGκ | IgGlFc | u-PA furin | C-terminus | SEQ ID NO: 21 |
| | | | w/o Cys | | |
| 1011 | IgGκ | IgGlFc | Full-length wild | C-terminus | SEQ ID NO: 987 |
| | | | type uPA w/Cys | | |
| 1012 | hIL2 | IgG1 Fc | No Activation | C-terminus | SEQ ID NO: 5 |
| | | | Sequence | | |
| 1013 | hIL2 | HSA | No Activation | C-terminus | SEQ ID NO: 5 |
| | | | Sequence | | |
| 1014 | IgGκ | HSA | furin with Cys | C-terminus | SEQ ID NO: 987 |
| 1015 | IgGκ | HSA | u-PA with Cys | C-terminus | SEQ ID NO: 987 |
| 1016 | IgGκ | HSA | furin without Cys | C-terminus | SEQ ID NO: 21 |
| 1017 | IgGκ | HSA | SUMO | C-terminus | SEQ ID NO: 21 |
| 1018 | IgGκ | IgG1 Fc | SUMO | C-terminus | SEQ ID NO: 21 |

[0865] The control protein has the sequence set forth in SEQ ID NO: 1005. The control protein contains the u-PA N-terminus (residues 1-158 of SEQ ID NO:3), wild-type u-PA activation sequence, and u-PA protease domain (SEQ ID NO:987), and no fusion partner. The fusion protein set forth in SEQ ID NO: 1004 includes the fusion partner (Fc) at the N-terminus. The fusion proteins set forth in SEQ ID NOs: 1006-1009 have different fusion partners at the C-terminus and lack an activation sequence N-terminal to the modified u-PA protease domain. The fusion proteins set forth in SEQ ID NOs: 1010 and 1011 contain Fc at the C-terminus and are activated differently from each other: the fusion protein set forth in SEQ ID NO: 1010 contains a furin activation sequence; and the fusion protein set forth in SEQ ID NO: 1011 contains the n-terminal region of u-PA and a wild-type u-PA activation sequence. The fusion proteins set forth in SEQ ID NOs: 1012 and 1013 are the same as the fusion proteins set forth in SEQ ID NOs: 1006 and 1007, respectively, but have the wild-type u-PA protease domain in place of the modified u-PA protease domain.

[0866] The fusion proteins set forth in SEQ ID NOs: 1014-1016 contain HSA at the C-terminus and are activated differently from each other: the fusion protein set forth in SEQ ID NO: 1014 contains a furin activation sequence; the fusion protein set forth in SEQ ID NO: 1015 contains a wild type u-PA activation sequence for activation; and the fusion protein set forth in SEQ ID NO: 1016 contains a furin domain for activation. The fusion proteins set forth in SEQ ID NOs: 1017 and 1018 contain SUMO as an activation domain at the N-terminus, and HSA or IgG-Fc at the C-terminus, respectively. Furin activation sequences were added to the fusion proteins set forth in SEQ ID NOs: 1010, 1014 and 1016 so that the protein can be activated during expression, thereby eliminating a requirement for an activation step during downstream processing.

[0867] 2. Construct Generation

[0868] (a) Preparation of u-PA Constructs

[0869] The constructs were assembled from synthetic oligonucleotides and/or PCR products and cloned into the pcDNA3.4-TOPO vector (Invitrogen; Cat. No. A14697) for expression under control of the human cytomegalovirus (CMV) immediate-early promoter/enhancer.

[0870] (b) Preparation of SUMO-u-PA Constructs

[0871] For expression of fusion proteins containing a SUMO tag (set forth in SEQ ID NOs: 1017 and 1018), DNA encoding the modified u-PA polypeptide with C122S (set forth in SEQ ID NO: 21) was cloned into the codon optimized pE5 expression vector (Thermo Scientific; sequence set forth in SEQ ID NO:988). The pE5 plasmid contains a multiple cloning site C-terminal to a SUMO sequence for cloning the fusion partner (HSA or Fc) and the modified u-PA protease domain. The final fusion protein is (1) a fusion partner (HSA or FC); (2) the modified u-PA protease domain with C122S (SEQ ID NO: 21); with an (3)N-terminal 6×His purification tag; and (4) SUMO.

[0872] B. Preparation of u-PA Fusion Polypeptides

[0873] Expected molecular weights of the u-PA fusion proteins are set forth below:

| | | Expected MW Reduced | |
|---|---|---|---|
| | Expected MW | | MW without |
| Name | Non-Reduced | MW with activation | activation |
| 1004 | 111,012 | Modified u-PA: 28,445.36 | 55506.07 |
| | | Fc: 27,078.73 | |
| 1005 | 46,389 | Modified u-PA: 28,445.36 | 46388.7 |
| | | uPA: 17,961.36 | |
| 1006 | 108,467 | 54233.44 | |
| 1007 | 95,286 | 95285.85 | |
| 1008 | 55,226 | 55226 | |
| 1009 | 40,297 | 40297 | |
| 1010 | 111,146 | 54233.44 | 55573 |
| 1011 | 144,386 | uPA: 17,961.36 | 72192.85 |
| | | Modified u-PA-Fc: 54,249.50 | |

| | | |
|---|---|---|
| 1012 | 108,461 | 54230.5 |
| 1013 | 95,283 | 95282.91 |

[0874] 1. Transformation, Expression, Folding and Refolding of u-PA

[0875] Fusion Proteins Fusion proteins with the sequences set forth in SEQ ID NOs: 1004-1013 were transformed and expressed as detailed in Example 14, above.

[0876] 2. Transformation, Expression, Folding and Refolding of u-PA-SUMO (Small Ubiquitin-Like Modifier) Fusion Proteins

[0877] Fusion proteins with the sequences set forth in SEQ ID NOs: 1017 and 1018 were prepared as detailed below.

[0878] Cloning of the SUMO-Modified u-PA Fusion Polypeptide for E. coli Expression

[0879] Competent BL21 Gold (DE3) E. coli cells are transformed with u-PA fusion protein in an expression vector (SEQ ID NO: 988), which was prepared by Thermo Scientific, using the standard heat shock method. The plasmid DNA is resuspended in 50 μL MQ water to obtain a 100 ng/mL stock solution. The plasmid DNA and competent BL21 Gold DE3 cells are thawed on ice. 0.5 μL DNA, are added to 50 μL cells in a sterile microfuge tube and incubated on ice for 30 minutes. The cell/DNA mixture are heat shocked by placing at 42° C. for 45 seconds. The cell/DNA mixture immediately are transferred back to ice and incubated on ice for 2 minutes. 450 μL pre-warmed (37° C.) SOC media is added to the cell/DNA mixture, and the resulting SOC/cell/DNA mixture is incubated at 37° C. with shaking. The cells in SOC (2-200 μL) are plated and spread on LB-carbenicillin plates, which are incubated overnight at 37° C. The plates harboring bacterial colonies are removed from the incubator, sealed with parafilm and stored at 4° C. Glycerol stocks of individual transformed colonies are prepared by standard methods and stored at −70° C.

[0880] C. Assessing Protein Expression of Fusion Proteins in Mammalian Cell Culture

[0881] Protein concentration from the expi293 cell culture supernatant (see Example 14) was assessed by ELISA and qualitatively by western blot. Protein expression after western blotting was scored on a 1 to 5 scale where 1 represents the highest expression and 5 represents no expression.

[0882] Six samples were tested for each construct. The results are set forth in the tables below. The results show that by ELISA and Western Blotting of the fusion proteins set forth in SEQ ID NOs: 1004, 1007-1009 and 1013 were poorly expressed. The proteins set forth in SEQ ID NOs: 1005, 1010 and 1011 had the highest expression as assessed by qualitative western blot and ELISA.

TABLE
Protein Expression Assessed by ELISA

| Sample | ELISA Titer | u-PA ELISA |
|---|---|---|
| SEQ ID | (mg/L) | (mg/L) |
| 1004 | 0.4 | 0.4 |
| 1005 | 75.39 | 149.7 |
| 1006 | 2.2 | 2.6 |
| 1007 | 0.3 | 0.3 |
| 1008 | 0.06 | 0.1 |
| 1009 | 0.26 | 0.3 |
| 1010 | 15.89 | 17.3 |
| 1011 | 21.66 | 19.3 |
| 1012 | 7.5 | 16.2 |
| 1013 | 5.46 | 4.7 |

R squared = 0.9993; limit of detection = 0.109 ng/mL; limit of quantitation = l.375 ng/mL

TABLE
Protein Expression Assessed by Western Blotting

| SEQ ID NO: | SDS-PAGE/Western Ranking |
|---|---|
| 1004 | 4 |
| 1005 | 1 |
| 1006 | 3 |
| 1007 | 3 |
| 1008 | 5 |
| 1009 | 5 |
| 1010 | 1 |
| 1011 | 1 |
| 1012 | 3 |
| 1013 | 4 |

[0883] D. Fusion Protein Activation Strategies

[0884] Various strategies were employed for u-PA activation. The proteins set forth in SEQ ID NOs: 1004-1005, 1011 and 1015 were activated by plasmin, as detailed above in Example 14. The proteins set forth in SEQ ID NOs: 1010, 1014 and 1016 were expected to be activated by intracellular furin during expression. The protein set forth in SEQ ID NO: 1006-1008 were anticipated to be auto-activated during expression. The proteins set forth in SEQ ID NOs: 1017 and 1018 were activated by SUMO protease treatment. To activate the SUMO-u-PA constructs, typically 10 Units of SUMO protease per 1 mg of protein was added and allowed to incubate overnight at 4° C. Further purification on a HisTrap nickel chelation column would effectively remove the His-tagged SUMO moiety.

| SEQ ID | | |
|---|---|---|
| NO: | Activation Sequence | Activation Strategy |
| 1004 | uPA wt w/Cys | Plasmin treatment |
| 1005 | Full-length uPA w/Cys | Plasmin treatment |
| 1006 | No activation sequence | Secretion signal cleavage during |
| | | expression generates activated |
| | | protease |
| 1007 | No activation sequence | Secretion signal cleavage during |
| | | expression generates activated |
| | | protease |
| 1008 | No activation sequence | Secretion signal cleavage during |
| | | expression generates activated |
| | | protease |
| 1009 | C3 activation sequence | C3 sequence autoactivated post |
| | | expression |
| 1010 | uPA Furin w/o Cys | Furin activation during expression; |
| | | activiation not necessary during |
| | | downstream processing |
| 1011 | Full-length WT uPA w/Cys | Plasmin treatment |
| 1012 | No activation sequence | Secretion signal cleavage during |
| | | expression generates activated |
| | | protease |
| 1013 | No activation sequence | Secretion signal cleavage during |
| | | expression generates activated |
| | | protease |
| 1014 | Furin with Cys | Intracellular activation by Furin |
| | | during expression; activation not |
| | | necessary during downstream |
| | | processing |
| 1015 | uPA with Cys | Plasmin treatment |
| 1016 | Furin without Cys | Intracellular activation by Furin |
| | | during expression; activation not |
| | | necessary during downstream |
| | | processing |
| 1017 | SUMO | SUMO protease treatment |
| 1018 | SUMO | SUMO protease treatment |

[0885] E. Measuring Enzyme Activity

[0886] Volume specific activity of expi293 HEK supernatants containing the u-PA fusion proteins on 40 μM human C3 FRET peptide was assessed as described in Example 15. The interpolated, dilution-adjusted initial rate (nM EDANS/min/μL sample) was calculated. Fusion proteins set forth in SEQ ID NOs: 1004, 1005, 1008 and 1011-1013 showed no activity. Fusion proteins set forth in SEQ ID NOs: 1006, 1007, 1009 and 1010 demonstrated u-PA protease activity. Modified u-PA with a Furin activation sequence N-terminal to u-PA with an Ig FC fusion at the C-terminus (set forth in SEQ ID NO: 1010) showed the highest activity. The results are set forth in the table below.

| SEQ ID | Activity (nM | Can auto- | No Activity on |
|---|---|---|---|
| NO. | EDANS/min/μL sample) | activate | Mouse C3 |
| 1004 | −0.1 | | |
| 1005 | −0.1 | | |
| 1006 | 3.7 | X | X |
| 1007 | 3.2 | X | X |
| 1008 | 0.3 | X | |
| 1009 | 2.7 | X | |
| 1010 | 56.0 | X | |
| 1011 | −0.1 | | |
| 1012 | 0.0 | X | |
| 1013 | 0.1 | X | |

[0887] F. Affinity Purification

[0888] The fusion proteins set forth in SEQ ID NOs: 1010 and 1011 had the greatest expression as assessed by western blotting and ELISA. The Furin-variant u-PA-Fc and full-length uPA-Fc fusion proteins set forth in SEQ ID NOs: 1010 and 1011, respectively, were Protein A affinity purified using the manufacturer's recommended conditions (GE Healthcare).

[0889] G. Purification and Activity Assessment of High-Expressing Fusion Proteins

[0890] After affinity purification, protein concentrations were assessed by absorbance at 280 nm and by the u-PA ELISA (see Example 15), while purity was evaluated by SDS-PAGE gel electrophoresis and analytical size exclusion chromatography (SEC), as described above in Example 14. Both fusion proteins were expressed. Purity, when assessed by gel electrophoresis and staining, and by analytical size exclusion chromatography (SEC), was deemed to be poor for the fusion protein whose sequence is set forth in SEQ ID NO: 1010 (u-PA Furin w/o Cys). Purity by gel electrophoresis was deemed good for the fusion protein set forth in SEQ ID NO: 1011 (full-length WT uPA w/Cys). The results are set forth in the table below:

| | | Total | Concentration | | Total Protein | | | |
|---|---|---|---|---|---|---|---|---|
| SEQ ID | | Volume | (mg/mL) | | Yield (mg) | | Purity | Purity by |
| NO. | Column | (mL) | A280 | ELISA | A280 | ELISA | by Gel | SEC |
| 1010 | ProA | 8.6 | 4.23 | 0.60 | 36.38 | 5.19 | Poor | Poor |
| 1011 | ProA | 13.6 | 1.69 | 1.04 | 22.98 | 14.09 | Good | Poor |

[0891] u-PA enzyme activity after affinity purification was assessed on the Human C3 FRET Peptide assay as described above in Example 15. The results are set forth in the table below:

| | | | | | ELISA: Activity |
|---|---|---|---|---|---|
| | Volumetric | | A280: Relative | | Relative to |
| | Specific | A280: Enzyme | Activity to the | ELISA: Enzyme | variant u-PA |
| SEQ | Activity | Specific Activity | u-PA SEQ ID | Specific Activity | protease domain |
| ID NO. | (nmol/min/mL) | (nmol/min/mg) | NO: 21 | (nmol/min/mg) | (SEQ ID NO 21) |
| 1010 | 466.81 | 110.36 | 2% | 773.05 | 45% |
| 1011 | 0.10 | 0.06 | 0% | 0.10 | 0% |

[0892] The u-PA enzyme activity after affinity purification was assessed on the Human C3 FRET Peptide assay as described above in Example 15. Enzyme activity was assessed after plasmin activation as described above in Example 14. The results are set forth in the table below:

| | | | | | Relative activity |
|---|---|---|---|---|---|
| | | Relative | | | (nmol/min/ |
| | Enzyme | activity | | Enzyme | nmol) |
| | specific | (nmol/min/ | | specific | compared to |
| SEQ | activity | mg) | | activity | to u-PA |
| ID | (nmol/min/ | to u-PA SEQ | | (nmol/min/ | SEQ ID |
| NO. | mg) | ID NO: 21 | MW | nmol) | NO: 21 |
| 21 | 692 | 100% | 28429 | 19.7 | 100% |
| 1011 | 198 | 29% | 144385 | 14.3 | 73% |
| 1015 | 178 | 26% | 95301 | 20.2 | 103% |

[0893] H. Description of Fusion Proteins with Modified u-PA Polypeptides that Cleave C3

[0894] Fusion proteins with u-PA polypeptides are described below. Exemplary sequences are provided in the following discussion.

[0895] 1. Catalytic Domains

[0896] The catalytic domain (protease domain) can be any of the protease domains of the modified u-PA polypeptides provided herein (see Example 2, Table 14, which provides the ED₅₀ for protease domains containing various modifications as described herein and in the Examples), particularly any with an ED₅₀ less than 100 nM, as described in Example 2, or less than 50 nM, 30 nM, or 10 nM. Exemplary of the modified uPA protease domain is that set forth in SEQ ID NO:21, except, when using it to activate to produce a two chain polypeptide, residue 122 (by chymotrypsin numbering) is C, not S as in SEQ ID NO:21. Tab The modified uPA polypeptide protease domains:

SEQ ID NO: 987:
IIGGEFTTIE NQPWFAAIYQ RYEGGSEYYR
CGGSLISPCWVISATHCFIP QPKKEDYIVY LGRSRLNSNT
QGEMKFEVEN LILHKDYSAD IAAQHNDIALLKIRSKEGRC
AQPSRTIQTI CLPSMYNDPQ FGTSCEITGF GKENSTDRLY
PEQLKMTVVKLISHRECQQP HYYGSEVTTK MLCAADPQWK
TDSCQGDSGG PLVCSLQGRM LTGIVSWGRGCALKDKPGV
YTRVSHFLPW IRSHTKEENG LAL;

[0897] SEQ ID NO: 21 modified uPA polypeptide protease domain containing a C122S mutation: IIGGEFTTIENQPWFAAIYQRY EGGSEYYRCG GSLISPCWVI SATHCFIPQP KKEDYIVYLG RSRLNSNTQGEMKFEVENLI LHKDYSADIA AQHNDIALLK IRSKEGRCAQ PSRTIQTISL PSMYNDPQFGTSCEITGFGK ENSTDRLYPE QLKMTVVKLI SHRECQQPHY YGSEVTTKML CAADPQWKTDSCQGDSGGPL VCSLQGRMTL TGIVSWGRGC ALKDKPGVYT RVSHFLPWIR SHTKEENGLAL contain amino acid replacements compared to the native uPA polypeptide protease domain SEQ ID NO: 2:

IIGGEFTTIE NQPWFAAIYR RHRGGSVTYV
CGGSL[I/M]SPCWVISATHCFID YPKKEDYIVY
LGRSRLNSNT QGEMKFEVEN LILHKDYSAD
TLAHHNDIALLKIRSKEGRC AQPSRTIQTI CLPSMYNDPQ
FGTSCEITGF GKENSTDYLY PEQLKMTVVKLISHRECQQP
HYYGSEVTTK MLCAADPQWK TDSCQGDSGG PLVCSLQGRM
TLTGIVSWGRGCALKDKPGV YTRVSHFLPW IRSHTKEENG
LAL;

or compared to the protease domain in which the C at residue 122 (by chymotrypsin numbering) is S as set forth in SEQ ID NO:5:

IIGGEFTTIENQPWFAAIYRRHRGGSVTYVCGGSLISPCWVISAT
HCFIDYPKKEDYIVYLGRSRLNSNTQGEMKFEVENLILHKDYSAD
TLAHHNDIALLKIRSKEGRCAQPSRTIQTISLPSMYNDPQFGTSC
EITGFGKENSTDYLYPEQLKMTVVKLISHRECQQPHYYGSEVTTK
MLCAADPQWKTDSCQGDSGGPLVCSLQGRMTLTGIVSWGRGCALK
DKPGVYTRVSHFLPWIRSHTKEENGLAL.

[0898] As shown herein, the modified u-PA polypeptides, exhibit altered proteolytic activity and biochemical properties compared to the native u-PA. The u-PA polypeptides are modified to have increased activity for cleaving C3, as described herein, and to have reduced activity for cleaving their native substrate.

[0899] 2. Secretion Signals

[0900] To ensure the extracellular secretion of modified u-PA polypeptide during protein expression, a secretion signal can be included in the construct to direct secretion of the encoded polypeptide upon expression. Many such signals are known to those of skill in the art. These include the native u-PA signal, and others, such as the mKLC secretion signal (SEQ ID NO: 999 (METDTLLLWVLLLWVPGSTG)) sequence or the human IL2 secretion signal (SEQ ID NO: 1000 (MYRMQLLSCI ALSLALVTNS), and others exemplified herein. Signal sequences generally occur on the N-terminus of a polypeptide to direct secretion; they are removed by the host cell.

[0901] 3. Fusion Partners

[0902] In addition to amino acid replacement, insertion or deletion, additional modifications can be added to the uPA polypeptide to create a fusion or chimeric protein. Numerous fusion partners and their properties are known to those of skill in the art. These include, for example, fusion partners that can multimerized, those that can increase serum half-life, and those that alter binding properties or target the polypeptide. For example, modified and native uPA polypeptides can be linked to an antibody fragment or multimerization domain such as the Fc region of an immunoglobulin polypeptide IgG1 (SEQ ID NO: 992 (DKT HTCPPCPAPE LLGGPSVFLF PPKPKDTLMI SRTPEVTCVV VDVSHEDPEV KFNWYVDGVE VHNAKTKPRE EQYNSTYRVV SVLTVLHQDW LNGKEYKCKV SNKALPAPIE KTISKAKGQP REPQVYTLPP SRDELTKNQV SLTCLVKGFY PSDIAVEWES NGQPENNYKT TPPVLDSDGS FFLYSKLTVD KSRWQQGNVF SCSVMHEALH NHYTQKSLSL SPG)) or Collagen II scFv (SEQ ID NO: 993 (QVQLQQPGADL VRPGVSVKLSCKASGYTFTS YWMNWVKQRP GQGLEWIGMI HPSDSETRLS QKFKDKATLT VDKSSSTAYMQLSSPTSEDS AVYYCARLKP GGTWFAYWGQ GTLVTVSAGG GGSGGGGSGG GGSGGSDIVLTQSPASLTVS LGQRATISCR ASKSVDSYGN SFMEWYQQKP GQPPKLLIYR ASNLESGIPARFSGSGSRTD FTLTINPVEA DDVATYYCQQ SNEDPYTFGG GTKLEIK)) to alter pharmacological properties of the u-PA polypeptides.

[0903] To alter pharmacological properties, the uPA polypeptides, for example, can be fused to a ligand or polypeptide, such as an antibody, or other protein, such as human serum albumin (HSA; SEQ ID NO: 991): DAHKSEVAHRFKDLGEENFKALVLIAFAQYLQQCPFEDHVKLVNEVTEFAKT CVADESAENCDKSLHTLFGDKLCTVATLRETYGEMADCCAKQEPERNECFL QHKDDNPNLPRLVRPEVDVMCTAFHDNEETFLKKYLYEIARRHPYFYAPELL FFAKRYKAAFTECCQAADKAACLLPKLDELRDEGKAS SAKQRLKCASLQKF GERAFKAWAVARLSQRFPKAEFAEVSKLVTDLTKVHTECCHGDLLECADDR ADLAKYICENQDSISSKLKECCEKPLLEKSHCIAEVENDEMPADLPSLAADFV ESKDVCKNYAEAKDVFLGMFLYEYARRHPDYSVVLLLRLAKTYETTLEKCC AAADPHECYAKVFDEFKPLVEEPQNLIKQNCELFEQLGEYKFQNALLVRYTK KVPQVSTPTLVEVSRNLGKVGSKCCKHPEAKRMPCAEDYLSVVLNQLCVLH EKTPVSDRVTKCCTESLVNRRPCFSALEVDETYVPKEFNAETFTFHADICTLSE KERQIKKQTALVELVKHKPKATKEQLKAVMDDFAAFVEKCCKADDKETCFA EEGKKLVAASQAALGL), or a hyaluronic acid binding domain (HABD), such as TSG-6 (SEQ ID NO: 994) ERAAGVYHREA RSGKYKLTYAEAKAVCEFEG GHLATYKQLE AARKIGFHVC AAGWMAKGRV GYPIVKPGPN CGFGKTGIIDYGIRLNRSER WDAYCYNPHA KE.

[0904] Typically, the u-PA protease activity remains functionally active within the resulting fusion protein, but the fusion peptide may change the pharmacokinetic and pharmacodynamic parameters of the u-PA polypeptide. Other fusion proteins containing a u-PA modified polypeptide can be created with a growth factor or a receptor to alter pharmacokinetic and pharmacodynamic properties.

[0905] 4. Activation Sequences

[0906] The u-PA polypeptide can be produced in an inactive form (zymogen) and modified posttranslationally via proteolytic cleavage to generate a mature and activated form. To do so, an activation sequence is included on the the native or modified u-PA polypeptide to suppress its enzymatic activity. After protein expression, cleavage of the activation sequence produces a mature u-PA protein. Examples of activations sequences, include, but are not limited, to the wild-type u-PA activation sequence (SEQ ID NO: 997 (QCGQKTLRPRFK) or SEQ ID NO: 998 (QSGQKTLRPRFK)) or a furin cleavage sequence (SEQ ID NOS: 995, 996, 1041, or 1044 (such as QCGQKTLRRRKR, or QSGQKTLRRRKR, or QSGKTLRRKR, or QSGQKTLRRKR). A disulfide linkage can be maintained between the cysteine within the activation sequence and the cysteine (C122 by chymotrypsin numbering) within the u-PA catalytic domain. Upon cleavage of the activation sequence, the activated molecule retains a covalent linkage between the N-terminal fragment activation or full N-terminal domain.

[0907] 5. Linkers

[0908] To join the u-PA polypeptide with other polypeptide sequences, a short, flexible sequence of amino acids (linker) is used. Examples of linkers include but are not limited to GGSSGG or GGGGS or AGS (such as those set forth in SEQ ID NOS: 1001-1003 and 1024-1030), as well as those discussed in the detailed description. Longer linkages with concatenations of these sequences repeated also are included such that a linker has the sequence (GGSSGG)ₙ₊₁, where n is 0 or an integer between 1 and 20. Other linkers are set forth in the Sequence Listing and in the Detailed Description.

[0909] 6. Other Modification of u-PA

[0910] Other peptide sequences such as 6×His SUMO (such as those set forth in SEQ ID NOS: 990, and 1031-1033 (DGHHHHHHGS LQDSEVNQEA KPEVKPEVKP ETHINLKVSD GSSEIFFKIK KTTPLRRLME AFAKRQGKEM DSL(T/R) FLYDGI (E/R) IQADQ (T/A)PED LDMEDNDIIE AHREQIGG)) can be added to facilitate the expression, secretion or purification of u-PA polypeptides. Additional chemical and posttranslational modification to the altered or native u-PA polypeptide can include but are not limited to a conjugation to a polymer such as PEGylation, PASylation, and sialylation to alter pharmacodynamic properties of the u-PA polypeptide.

[0911] 7. Exemplary Modified u-PA Polypeptides with N-Terminal Fusions

| | | | | | | | Other N |
|---|---|---|---|---|---|---|---|
| | | Sequence | Fusion | | Activation | Catalytic | terminal |
| Seq | | signal | partner | Linker | Sequence | domain | domain |
| ID | | (residue | (residue | (residue | (residue | (residue | (residue |
| No. | Name | nos.) | nos.) | nos.) | nos.) | nos.) | nos.) |
| 1004 | Fc-u-PA | METDTLLL | DKTHTCPPCP | AGS | QCGQKTLRP | IIGGEFTTIE | |
| | (SEQ ID | WVLLLWVP | APELLGGPSV | (247-249) | RFK | NQPWFAAIYQ | |
| | NO: 987) | GSTG | FLFPPKPKDT | | (250-261) | RYEGGSEYYR | |
| | | (1-20) | LMISRTPEVT | | | CGGSLISPCW | |
| | | | CVVVDVSHED | | | VISATHCFIP | |
| | | | PEVKFNWYVD | | | QPKKEDYIVY | |
| | | | GVEVHNAKTK | | | LGRSRLNSNT | |
| | | | PREEQYNSTY | | | QGEMKFEVEN | |
| | | | RVVSVLTVLH | | | LILHKDYSAD | |
| | | | QDWLNGKEYK | | | IAAQHNDIAL | |
| | | | CKVSNKALPA | | | LKIRSKEGRC | |
| | | | PIEKTISKAK | | | AQPSRTIQTI | |
| | | | GQPREPQVYT | | | CLPSMYNDPQ | |
| | | | LPPSRDELTK | | | FGTSCEITGF | |
| | | | NQVSLTCLVK | | | GKENSTDRLY | |
| | | | GFYPSDIAVE | | | PEQLKMTVVK | |
| | | | WESNGQPENN | | | LISHRECQQP | |
| | | | YKTTPPVLDS | | | HYYGSEVTTK | |
| | | | DGSFFLYSKL | | | MLCAADPQWK | |
| | | | TVDKSRWQQG | | | TDSCQGDSGG | |
| | | | NVFSCSVMHE | | | PLVCSLQGRM | |
| | | | ALHNHYTQKS | | | TLTGIVSWGR | |
| | | | LSLSPG | | | GCALKDKPGV | |
| | | | (21-240) | | | YTRVSHFLPW | |
| | | | | | | IRSHTKEENG | |
| | | | | | | LAL | |
| | | | | | | (262-514) | |
| 1005 | N-term | METDTLLL | — | — | QCGQKTLRP | IIGGEFTTIE | SNELHQVPSN |
| | u-PA-u- | WVLLLWVP | | | RFK | NQPWFAAIYQ | CDCLNGGTCV |
| | PA | GSTG | | | (167-178) | RYEGGSEYYR | SNKYFSNIHW |
| | (SEQ ID | (1-20) | | | | CGGSLISPCW | CNCPKKFGGQ |
| | NO: 987) | | | | | VISATHCFIP | HCEIDKSKTC |
| | | | | | | QPKKEDYIVY | YEGNGHFYRG |
| | | | | | | LGRSRLNSNT | KASTDTMGRP |
| | | | | | | QGEMKFEVEN | CLPWNSATVL |
| | | | | | | LILHKDYSAD | QQTYHAHRSD |
| | | | | | | IAAQHNDIAL | ALQLGLGKHN |
| | | | | | | LKIRSKEGRC | YCRNPDNRRR |
| | | | | | | AQPSRTIQTI | PWCYVQVGLK |
| | | | | | | CLPSMYNDPQ | PLVQECMVHD |
| | | | | | | FGTSCEITGF | CADGKKPSSP |
| | | | | | | GKENSTDRLY | PEELKF |
| | | | | | | PEQLKMTVVK | (21-166) |
| | | | | | | LISHRECQQP | |
| | | | | | | HYYGSEVTTK | |
| | | | | | | MLCAADPQWK | |
| | | | | | | TDSCQGDSGG | |
| | | | | | | PLVCSLQGRM | |
| | | | | | | TLTGIVSWGR | |
| | | | | | | GCALKDKPGV | |
| | | | | | | YTRVSHFLPW | |
| | | | | | | IRSHTKEENG | |
| | | | | | | LAL | |
| | | | | | | (179-431) | |

* u-PA protease domain of SEQ ID NO: 21 (with and without the C122S replacement)

[0912] FIG. 2 sets forth schematics of the u-PA polypeptides with N-terminal fusions, such as the N-terminal fusion polypeptides set forth in SEQ ID NOS: 1004 and 1005.

[0913] 8. Exemplary Modified u-PA Polypeptides with C-Terminal Fusions

| | | Sequence | | | | | |
|---|---|---|---|---|---|---|---|
| SEQ | | signal | | Linker | | | Other |
| ID | | (residue | Catalytic | (residue | Activation | Fusion | N terminal |
| No. | Name | nos.) | domain | nos.) | Sequence | partner | domain |
| 1006 | uPA | MYRMQLLSCI | IIGGEFTTIENQP | GGSSGG | None | DKTHTCPPCPAPELL | |
| | (SEQ ID | ALSLALVTNS | WFAAIYQRYEGGS | (274-279) | | GGPSVFLFPPKPKDT | |
| | NO: 21)- | (1-20) | EYYRCGGSLISPC | | | LMISRTPEVTCVVVD | |
| | Fc (No | | WVISATHCFIPQP | | | VSHEDPEVKFNWYVD | |
| | PP) | | KKEDYIVYLGRSR | | | GVEVHNAKTKPREEQ | |
| | | | LNSNTQGEMKFEV | | | YNSTYRVVSVLTVLH | |
| | | | ENLILHKDYSADI | | | QDWLNGKEYKCKVSN | |
| | | | AAQHNDIALLKIR | | | KALPAPIEKTISKAK | |
| | | | SKEGRCAQPSRTI | | | GQPREPQVYTLPPSR | |
| | | | QTISLPSMYNDPQ | | | DELTKNQVSLTCLVK | |
| | | | FGTSCEITGFGKE | | | GFYPSDIAVEWESNG | |
| | | | NSTDRLYPEQLKM | | | QPENNYKTTPPVLDS | |
| | | | TVVKLISHRECQQ | | | DGSFFLYSKLTVDKS | |
| | | | PHYYGSEVTTKML | | | RWQQGNVFSCSVMHE | |
| | | | CAADPQWKTDSCQ | | | ALHNHYTQKSLSLSP | |
| | | | GDSGGPLVCSLQG | | | G | |
| | | | RMTLTGIVSWGRG | | | (280-505) | |
| | | | CALKDKPGVYTRV | | | | |
| | | | SHFLPWIRSHTKE | | | | |
| | | | ENGLAL | | | | |
| | | | (21-273) | | | | |
| 1007 | uPA | MYRMQLLSCI | IIGGEFTTIE | GGSSGG | None | DAHKSEVAHRFKDLG | |
| | (SEQ ID | ALSLALVTNS | NQPWFAAIYQ | (274-279) | | EENFKALVLIAFAQY | |
| | NO: 21)- | (1-20) | RYEGGSEYYR | | | LQQCPFEDHVKLVNE | |
| | HSA | | CGGSLISPCW | | | VTEFAKTCVADESAE | |
| | (No PP) | | VISATHCFIP | | | NCDKSLHTLFGDKLC | |
| | | | QPKKEDYIVY | | | TVATLRETYGEMADC | |
| | | | LGRSRLNSNT | | | CAKQEPERNECFLQH | |
| | | | QGEMKFEVEN | | | KDDNPNLPRLVRPEV | |
| | | | LILHKDYSAD | | | DVMCTAFHDNEETFL | |
| | | | IAAQHNDIAL | | | KKYLYEIARRHPYFY | |
| | | | LKIRSKEGRC | | | APELLFFAKRYKAAF | |
| | | | AQPSRTIQTI | | | TECCQAADKAACLLP | |
| | | | SLPSMYNDPQ | | | KLDELRDEGKASSAK | |
| | | | FGTSCEITGF | | | QRLKCASLQKFGERA | |
| | | | GKENSTDRLY | | | FKAWAVARLSQRFPK | |
| | | | PEQLKMTVVK | | | AEFAEVSKLVTDLTK | |
| | | | LISHRECQQP | | | VHTECCHGDLLECAD | |
| | | | HYYGSEVTTK | | | DRADLAKYICENQDS | |
| | | | MLCAADPQWK | | | ISSKLKECCEKPLLE | |
| | | | TDSCQGDSGG | | | KSHCIAEVENDEMPA | |
| | | | PLVCSLQGRM | | | DLPSLAADFVESKDV | |
| | | | TLTGIVSWGR | | | CKNYAEAKDVFLGMF | |
| | | | GCALKDKPGV | | | LYEYARRHPDYSVVL | |
| | | | YTRVSHFLPW | | | LLRLAKTYETTLEKC | |
| | | | IRSHTKEENG | | | CAAADPHECYAKVFD | |
| | | | LAL | | | EFKPLVEEPQNLIKQ | |
| | | | (21-273) | | | NCELFEQLGEYKFQN | |
| | | | | | | ALLVRYTKKVPQVST | |
| | | | | | | PTLVEVSRNLGKVGS | |
| | | | | | | KCCKHPEAKRMPCAE | |
| | | | | | | DYLSVVLNQLCVLHE | |
| | | | | | | KTPVSDRVTKCCTES | |
| | | | | | | LVNRRPCFSALEVDE | |
| | | | | | | TYVPKEFNAETFTFH | |
| | | | | | | ADICTLSEKERQIKK | |
| | | | | | | QTALVELVKHKPKAT | |
| | | | | | | KEQLKAVMDDFAAFV | |
| | | | | | | EKCCKADDKETCFAE | |
| | | | | | | EGKKLVAASQAALGL | |
| | | | | | | (280-864) | |
| 1008 | uPA | MYRMQLLSCI | IIGGEFTTIE | GGSSGG | None | QVQLQQPGADLVRPG | |
| | (SEQ ID | ALSLALVTNS | NQPWFAAIYQ | (274-279) | | VSVKLSCKASGYTFT | |
| | NO: 21)- | (1-20) | RYEGGSEYYR | | | SYWMNWVKQRPGQGL | |
| | C2scFv | | CGGSLISPCW | | | EWIGMIHPSDSETRL | |
| | (No PP) | | VISATHCFIP | | | SQKFKDKATLTVDKS | |
| | | | QPKKEDYIVY | | | SSTAYMQLSSPTSED | |
| | | | LGRSRLNSNT | | | SAVYYCARLKPGGTW | |
| | | | QGEMKFEVEN | | | FAYWGQGTLVTVSAG | |
| | | | LILHKDYSAD | | | GGGSGGGGSGGGGSG | |
| | | | IAAQHNDIAL | | | GSDIVLTQSPASLTV | |
| | | | LKIRSKEGRC | | | SLGQRATISCRASKS | |
| | | | AQPSRTIQTI | | | VDSYGNSFMEWYQQK | |
| | | | SLPSMYNDPQ | | | PGQPPKLLIYRASNL | |
| | | | FGTSCEITGF | | | ESGIPARFSGSGSRT | |
| | | | GKENSTDRLY | | | DFTLTINPVEADDVA | |
| | | | PEQLKMTVVK | | | TYYCQQSNEDPYTFG | |
| | | | LISHRECQQP | | | GGTKLEIK | |
| | | | HYYGSEVTTK | | | (280-527) | |
| | | | MLCAADPQWK | | | | |
| | | | TDSCQGDSGG | | | | |
| | | | PLVCSLQGRM | | | | |
| | | | TLTGIVSWGR | | | | |
| | | | GCALKDKPGV | | | | |
| | | | YTRVSHFLPW | | | | |
| | | | IRSHTKEENG | | | | |
| | | | LAL | | | | |
| | | | (21-273) | | | | |
| 1009 | uPA | MYRMQLLSCI | IIGGEFTTIENQP | GGSSGG | None | ERAAGVYHRE | |
| | (SEQ ID | ALSLALVTNS | WFAAIYQRYEGGS | (274-279) | | ARSGKYKLTY | |
| | NO: 21)- | (1-20) | EYYRCGGSLISPC | | | AEAKAVCEFE | |
| | HABD | | WVISATHCFIPQP | | | GGHLATYKQL | |
| | (No PP) | | KKEDYIVYLGRSR | | | EAARKIGFHV | |
| | | | LNSNTQGEMKFEV | | | CAAGWMAKGR | |
| | | | ENLILHKDYSAD | | | VGYPIVKPGP | |
| | | | IAAQHNDIAL | | | NCGFGKTGII | |
| | | | LKIRSKEGRC | | | DYGIRLNRSE | |
| | | | AQPSRTIQTI | | | RWDAYCYNPH | |
| | | | SLPSMYNDPQ | | | AKE | |
| | | | FGTSCEITGF | | | (280-382) | |
| | | | GKENSTDRLY | | | | |
| | | | PEQLKMTVVK | | | | |
| | | | LISHRECQQP | | | | |
| | | | HYYGSEVTTK | | | | |
| | | | MLCAADPQWK | | | | |
| | | | TDSCQGDSGG | | | | |
| | | | PLVCSLQGRM | | | | |
| | | | TLTGIVSWGR | | | | |
| | | | GCALKDKPGV | | | | |
| | | | YTRVSHFLPW | | | | |
| | | | IRSHTKEENG | | | | |
| | | | LAL | | | | |
| | | | (21-273) | | | | |
| 1010 | uPA | METDTLLLWV | IIGGEFTTIENQP | GGSSGG | QSGQKTL | DKTHTCPPCP | |
| | (SEQ ID | LLLWVPGSTG | WFAAIYQRYEGGS | (285-290) | RRKR | APELLGGPSV | |
| | NO: 21)- | (1-20) | EYYRCGGSLISPC | | (21-31) | FLFPPKPKDT | |
| | Fc | | WVISATHCFIPQP | | | LMISRTPEVT | |
| | (Furin) | | KKEDYIVYLGRSR | | | CVVVDVSHED | |
| | | | LNSNTQGEMKFEV | | | PEVKFNWYVD | |
| | | | ENLILHKDYSADI | | | GVEVHNAKTK | |
| | | | AAQHNDIALLKIR | | | PREEQYNSTY | |
| | | | SKEGRCAQPSRTI | | | RVVSVLTVLH | |
| | | | QTISLPSMYNDPQ | | | QDWLNGKEYK | |
| | | | FGTSCEITGFGKE | | | CKVSNKALPA | |
| | | | NSTDRLYPEQLKM | | | PIEKTISKAK | |
| | | | TVVKLISHRECQQ | | | GQPREPQVYT | |
| | | | PHYYGSEVTTKML | | | LPPSRDELTK | |
| | | | CAADPQWKTDSCQ | | | NQVSLTCLVK | |
| | | | GDSGGPLVCSLQG | | | GFYPSDIAVE | |
| | | | RMTLTGIVSWGRG | | | WESNGQPENN | |
| | | | CALKDKPGVYTRV | | | YKTTPPVLDS | |
| | | | SHFLPWIRSHTKE | | | DGSFFLYSKL | |
| | | | ENGLAL | | | TVDKSRWQQG | |
| | | | (32-284) | | | NVFSCSVMHE | |
| | | | | | | ALHNHYTQKS | |
| | | | | | | LSLSPG | |
| | | | | | | (291-516) | |
| 1011 | uPA N- | METDTLLLWV | IIGGEFTTIENQ | GGSSGG | QCGQ | DKTHTCPPCP | SNELHQVPSNCDCL |
| | Term- | LLLWVPGSTG | PWFAAIYQRYEG | (432-437) | KTLRPRFK | APELLGGPSV | NGGTCVSNKYFSNI |
| | uPA | (1-20) | GSEYYRCGGSLI | | (167-178) | FLFPPKPKDT | HWCNCPKKFGGQHC |
| | (SEQ ID | | SPCWVISATHCF | | | LMISRTPEVT | EIDKSKTCYEGNGH |
| | NO: 987)- | | IPQPKKEDYIVY | | | CVVVDVSHED | FYRGKASTDTMGRP |
| | Fc | | LGRSRLNSNTQG | | | PEVKFNWYVD | CLPWNSATVLQQTY |
| | | | EMKFEVENLILH | | | GVEVHNAKTK | HAHRSDALQLGLGK |
| | | | KDYSADIAAQHN | | | PREEQYNSTY | HNYCRNPDNRRRPW |
| | | | DIALLKIRSKEG | | | RVVSVLTVLH | CYVQVGLKPLVQEC |
| | | | RCAQPSRTIQTI | | | QDWLNGKEYK | MVHDCADGKKPSSP |
| | | | CLPSMYNDPQFG | | | CKVSNKALPA | PEELKF |
| | | | TSCEITGFGKEN | | | PIEKTISKAK | (21-166) |
| | | | STDRLYPEQLKM | | | GQPREPQVYT | |
| | | | TVVKLISHRECQ | | | LPPSRDELTK | |
| | | | QPHYYGSEVTTK | | | NQVSLTCLVK | |
| | | | MLCAADPQWKTD | | | GFYPSDIAVE | |
| | | | SCQGDSGGPLVC | | | WESNGQPENN | |
| | | | SLQGRMTLTGIV | | | YKTTPPVLDS | |
| | | | SWGRGCALKDKP | | | DGSFFLYSKL | |
| | | | GVYTRVSHFLPW | | | TVDKSRWQQG | |
| | | | IRSHTKEENGLA | | | NVFSCSVMHE | |
| | | | L | | | ALHNHYTQKS | |
| | | | (179-431) | | | LSLSPG | |
| | | | | | | (438-663) | |
| 1012 | WT | MYRMQLLSCI | IIGGEFTTIENQP | GGSSGG | None | DKTHTCPPCPAPELL | |
| | uPA | ALSLALVTNS | WFAAIYRRHRGGS | (274-279) | | GGPSVFLFPPKPKDT | |
| | with | (1-20) | VTYVCGGSLMSPC | | | LMISRTPEVTCVVVD | |
| | C122S- | | WVISATHCFIDYP | | | VSHEDPEVKFNWYVD | |
| | Fc (No | | KKEDYIVYLGRSR | | | GVEVHNAKTKPREEQ | |
| | PP) | | LNSNTQGEMKFEV | | | YNSTYRVVSVLTVLH | |
| | | | ENLILHKDYSADT | | | QDWLNGKEYKCKVSN | |
| | | | LAHHNDIALLKIR | | | KALPAPIEKTISKAK | |
| | | | SKEGRCAQPSRTI | | | GQPREPQVYTLPPSR | |
| | | | QTISLPSMYNDPQ | | | DELTKNQVSLTCLVK | |
| | | | FGTSCEITGFGKE | | | GFYPSDIAVEWESNG | |
| | | | NSTDYLYPEQLKM | | | QPENNYKTTPPVLDS | |
| | | | TVVKLISHRECQQ | | | DGSFFLYSKLTVDKS | |
| | | | PHYYGSEVTTKML | | | RWQQGNVFSCSVMHE | |
| | | | CAADPQWKTDSCQ | | | ALHNHYTQKSLSLSP | |
| | | | GDSGGPLVCSLQG | | | G | |
| | | | RMTLTGIVSWGRG | | | (280-505) | |
| | | | CALKDKPGVYTRV | | | | |
| | | | SHFLPWIRSHTKE | | | | |
| | | | ENGLAL | | | | |
| | | | (21-273) | | | | |
| 1013 | WT | MYRMQLLSCI | IIGGEFTTIEN | GGSSGG | None | DAHKSEVAHRFKDLG | |
| | uPA | ALSLALVTNS | QPWFAAIYRRH | (274-279) | | EENFKALVLIAFAQY | |
| | with | (1-20) | RGGSVTYV | | | LQQCPFEDHVKLVNE | |
| | C122S - | | CGGSLMSPCW | | | VTEFAKTCVADESAE | |
| | HSA | | VISATHCFID | | | NCDKSLHTLFGDKLC | |
| | (No PP) | | YPKKEDYIVY | | | TVATLRETYGEMADC | |
| | | | LGRSRLNSNT | | | CAKQEPERNECFLQH | |
| | | | QGEMKFEVEN | | | KDDNPNLPRLVRPEV | |
| | | | LILHKDYSAD | | | DVMCTAFHDNEETFL | |
| | | | TLAHHNDIAL | | | KKYLYEIARRHPYFY | |
| | | | LKIRSKEGRC | | | APELLFFAKRYKAAF | |
| | | | AQPSRTIQTI | | | TECCQAADKAACLLP | |
| | | | SLPSMYNDPQ | | | KLDELRDEGKASSAK | |
| | | | FGTSCEITGF | | | QRLKCASLQKFGERA | |
| | | | GKENSTDYLY | | | FKAWAVARLSQRFPK | |
| | | | PEQLKMTVVK | | | AEFAEVSKLVTDLTK | |
| | | | LISHRECQQP | | | VHTECCHGDLLECAD | |
| | | | HYYGSEVTTK | | | DRADLAKYICENQDS | |
| | | | MLCAADPQWK | | | ISSKLKECCEKPLLE | |
| | | | TDSCQGDSGG | | | KSHCIAEVENDEMPA | |
| | | | PLVCSLQGRM | | | DLPSLAADFVESKDV | |
| | | | TLTGIVSWGR | | | CKNYAEAKDVFLGMF | |
| | | | GCALKDKPGV | | | LYEYARRHPDYSVVL | |
| | | | YTRVSHFLPW | | | LLRLAKTYETTLEKC | |
| | | | IRSHTKEENG | | | CAAADPHECYAKVFD | |
| | | | LAL | | | EFKPLVEEPQNLIKQ | |
| | | | (21-273) | | | NCELFEQLGEYKFQN | |
| | | | | | | ALLVRYTKKVPQVST | |
| | | | | | | PTLVEVSRNLGKVGS | |
| | | | | | | KCCKHPEAKRMPCAE | |
| | | | | | | DYLSVVLNQLCVLHE | |
| | | | | | | KTPVSDRVTKCCTES | |
| | | | | | | LVNRRPCFSALEVDE | |
| | | | | | | TYVPKEFNAETFTFH | |
| | | | | | | ADICTLSEKERQIKK | |
| | | | | | | QTALVELVKHKPKAT | |
| | | | | | | KEQLKAVMDDFAAFV | |
| | | | | | | EKCCKADDKETCFAE | |
| | | | | | | EGKKLVAASQAALGL | |
| | | | | | | (280-864) | |
| 1036 | uPA N- | METDTLLLWV | IIGGEFTTIENQ | GGSSGG | QCGQ | DKTHTCPPCPAPELL | SNELHQVPSNCDC |
| | term- | LLLWVPGSTG | PWFAAIYQRYEG | (432-437) | KTLRRRKR | GGPSVFLFPPKPKDT | LNGGTCVSNKYFS |
| | uPA | (1-20) | GSEYYRCGGSLI | | (167-178) | LMISRTPEVTCVVVD | NIHWCNCPKKFGG |
| | (SEQ ID | | SPCWVISATHCF | | | VSHEDPEVKFNWYVD | QHCEIDKSKTCYE |
| | NO: 987)- | | IPQPKKEDYIVY | | | GVEVHNAKTKPREEQ | GNGHFYRGKASTD |
| | Fc (Furin) | | LGRSRLNSNTQG | | | YNSTYRVVSVLTVLH | TMGRPCLPWNSAT |
| | | | EMKFEVENLILH | | | QDWLNGKEYKCKVSN | VLQQTYHAHRSDA |
| | | | KDYSADIAAQHN | | | KALPAPIEKTISKAK | LQLGLGKHNYCRN |
| | | | DIALLKIRSKEG | | | GQPREPQVYTLPPSR | PDNRRRPWCYVQV |
| | | | RCAQPSRTIQTI | | | DELTKNQVSLTCLVK | GLKPLVQECMVHD |
| | | | CLPSMYNDPQFG | | | GFYPSDIAVEWESNG | CADGKKPSSPPEE |
| | | | TSCEITGFGKEN | | | QPENNYKTTPPVLDS | LKF |
| | | | STDRLYPEQLKM | | | DGSFFLYSKLTVDKS | (21-166) |
| | | | TVVKLISHRECQ | | | RWQQGNVFSCSVMHE | |
| | | | QPHYYGSEVTTK | | | ALHNHYTQKSLSLSP | |
| | | | MLCAADPQWKTD | | | G | |
| | | | SCQGDSGGPLVC | | | (438-663) | |
| | | | SLQGRMTLTGIV | | | | |
| | | | SWGRGCALKDKP | | | | |
| | | | GVYTRVSHFLPW | | | | |
| | | | IRSHTKEENGLA | | | | |
| | | | L | | | | |
| | | | (179-431) | | | | |
| 1014 | uPA N- | METDTLLLWV | IIGGEFTTIENQ | GGSSGG | QCGQ | DAHKSEVAHRFKDLG | SNELHQVPSNCDCL |
| | term- | LLLWVPGSTG | PWFAAIYQRYEG | (432-437) | KTLRRRKR | EENFKALVLIAFAQY | NGGTCVSNKYFSNI |
| | uPA | (1-20) | GSEYYRCGGSLI | | (167-178) | LQQCPFEDHVKLVNE | HWCNCPKKFGGQHC |
| | (SEQ ID | | SPCWVISATHCF | | | VTEFAKTCVADESAE | EIDKSKTCYEGNGH |
| | NO: 987)- | | IPQPKKEDYIVY | | | NCDKSLHTLFGDKLC | FYRGKASTDTMGRP |
| | HSA (Furin) | | LGRSRLNSNTQG | | | TVATLRETYGEMADC | CLPWNSATVLQQTY |
| | | | EMKFEVENLILH | | | CAKQEPERNECFLQH | HAHRSDALQLGLGK |
| | | | KDYSADIAAQHN | | | KDDNPNLPRLVRPEV | HNYCRNPDNRRRPW |
| | | | DIALLKIRSKEG | | | DVMCTAFHDNEETFL | CYVQVGLKPLVQEC |
| | | | RCAQPSRTIQTI | | | KKYLYEIARRHPYFY | MVHDCADGKKPSSP |
| | | | CLPSMYNDPQFG | | | APELLFFAKRYKAAF | PEELKF |
| | | | TSCEITGFGKEN | | | TECCQAADKAACLLP | (21-166) |
| | | | STDRLYPEQLKM | | | KLDELRDEGKASSAK | |
| | | | TVVKLISHRECQ | | | QRLKCASLQKFGERA | |
| | | | QPHYYGSEVTTK | | | FKAWAVARLSQRFPK | |
| | | | MLCAADPQWKTD | | | AEFAEVSKLVTDLTK | |
| | | | SCQGDSGGPLVC | | | VHTECCHGDLLECAD | |
| | | | SLQGRMTLTGIV | | | DRADLAKYICENQDS | |
| | | | SWGRGCALKDKP | | | ISSKLKECCEKPLLE | |
| | | | GVYTRVSHFLPW | | | KSHCIAEVENDEMPA | |
| | | | IRSHTKEENGLA | | | DLPSLAADFVESKDV | |
| | | | L | | | CKNYAEAKDVFLGMF | |
| | | | (179-431) | | | LYEYARRHPDYSVVL | |
| | | | | | | LLRLAKTYETTLEKC | |
| | | | | | | CAAADPHECYAKVFD | |
| | | | | | | EFKPLVEEPQNLIKQ | |
| | | | | | | NCELFEQLGEYKFQN | |
| | | | | | | ALLVRYTKKVPQVST | |
| | | | | | | PTLVEVSRNLGKVGS | |
| | | | | | | KCCKHPEAKRMPCAE | |
| | | | | | | DYLSVVLNQLCVLHE | |
| | | | | | | KTPVSDRVTKCCTES | |
| | | | | | | LVNRRPCFSALEVDE | |
| | | | | | | TYVPKEFNAETFTFH | |
| | | | | | | ADICTLSEKERQIKK | |
| | | | | | | QTALVELVKHKPKAT | |
| | | | | | | KEQLKAVMDDFAAFV | |
| | | | | | | EKCCKADDKETCFAE | |
| | | | | | | EGKKLVAASQAALGL | |
| | | | | | | (438-1022) | |
| 1015 | uPA N- | METDTLLLWV | IIGGEFTTIE | GGSSGG | QCGQ | DAHKSEVAHRFKDLG | SNELHQVPSN |
| | term- | LLLWVPGSTG | NQPWFAAIYQ | (432-437) | KTLRPRFK | EENFKALVLIAFAQY | CDCLNGGTCV |
| | uPA | (1-20) | RYEGGSEYYR | | (167-178) | LQQCPFEDHVKLVNE | SNKYFSNIHW |
| | (SEQ ID | | CGGSLISPCW | | | VTEFAKTCVADESAE | CNCPKKFGGQ |
| | NO: 987)- | | VISATHCFIP | | | NCDKSLHTLFGDKLC | HCEIDKSKTC |
| | HSA | | QPKKEDYIVY | | | TVATLRETYGEMADC | YEGNGHFYRG |
| | | | LGRSRLNSNT | | | CAKQEPERNECFLQH | KASTDTMGRP |
| | | | QGEMKFEVEN | | | KDDNPNLPRLVRPEV | CLPWNSATVL |
| | | | LILHKDYSAD | | | DVMCTAFHDNEETFL | QQTYHAHRSD |
| | | | IAAQHNDIAL | | | KKYLYEIARRHPYFY | ALQLGLGKHN |
| | | | LKIRSKEGRC | | | APELLFFAKRYKAAF | YCRNPDNRRR |
| | | | AQPSRTIQTI | | | TECCQAADKAACLLP | PWCYVQVGLK |
| | | | CLPSMYNDPQ | | | KLDELRDEGKASSAK | PLVQECMVHD |
| | | | FGTSCEITGF | | | QRLKCASLQKFGERA | CADGKKPSSP |
| | | | GKENSTDRLY | | | FKAWAVARLSQRFPK | PEELKF |
| | | | PEQLKMTVVK | | | AEFAEVSKLVTDLTK | (21-166) |
| | | | LISHRECQQP | | | VHTECCHGDLLECAD | |
| | | | HYYGSEVTTK | | | DRADLAKYICENQDS | |
| | | | MLCAADPQWK | | | ISSKLKECCEKPLLE | |
| | | | TDSCQGDSGG | | | KSHCIAEVENDEMPA | |
| | | | PLVCSLQGRM | | | DLPSLAADFVESKDV | |
| | | | TLTGIVSWGR | | | CKNYAEAKDVFLGMF | |
| | | | GCALKDKPGV | | | LYEYARRHPDYSVVL | |
| | | | YTRVSHFLPW | | | LLRLAKTYETTLEKC | |
| | | | IRSHTKEENG | | | CAAADPHECYAKVFD | |
| | | | LAL | | | EFKPLVEEPQNLIKQ | |
| | | | 179-431 | | | NCELFEQLGEYKFQN | |
| | | | | | | ALLVRYTKKVPQVST | |
| | | | | | | PTLVEVSRNLGKVGS | |
| | | | | | | KCCKHPEAKRMPCAE | |
| | | | | | | DYLSVVLNQLCVLHE | |
| | | | | | | KTPVSDRVTKCCTES | |
| | | | | | | LVNRRPCFSALEVDE | |
| | | | | | | TYVPKEFNAETFTFH | |
| | | | | | | ADICTLSEKERQIKK | |
| | | | | | | QTALVELVKHKPKAT | |
| | | | | | | KEQLKAVMDDFAAFV | |
| | | | | | | EKCCKADDKETCFAE | |
| | | | | | | EGKKLVAASQAALGL | |
| | | | | | | (438-1022) | |
| 1016 | uPA | METDTLLLWV | IIGGEFTTIE | GGSSGG | QSGQKTL | DAHKSEVAHRFKDLG | |
| | (SEQ ID | LLLWVPGSTG | NQPWFAAIYQ | (286-291) | RRRKR | EENFKALVLIAFAQY | |
| | NO: 21)- | (1-20) | RYEGGSEYYR | | (21-32) | LQQCPFEDHVKLVNE | |
| | HSA | | CGGSLISPCW | | | VTEFAKTCVADESAE | |
| | (Furin) | | VISATHCFIP | | | NCDKSLHTLFGDKLC | |
| | | | QPKKEDYIVY | | | TVATLRETYGEMADC | |
| | | | LGRSRLNSNT | | | CAKQEPERNECFLQH | |
| | | | QGEMKFEVEN | | | KDDNPNLPRLVRPEV | |
| | | | LILHKDYSAD | | | DVMCTAFHDNEETFL | |
| | | | IAAQHNDIAL | | | KKYLYEIARRHPYFY | |
| | | | LKIRSKEGRC | | | APELLFFAKRYKAAF | |
| | | | AQPSRTIQTI | | | TECCQAADKAACLLP | |
| | | | SLPSMYNDPQ | | | KLDELRDEGKASSAK | |
| | | | FGTSCEITGF | | | QRLKCASLQKFGERA | |
| | | | GKENSTDRLY | | | FKAWAVARLSQRFPK | |
| | | | PEQLKMTVVK | | | AEFAEVSKLVTDLTK | |
| | | | LISHRECQQP | | | VHTECCHGDLLECAD | |
| | | | HYYGSEVTTK | | | DRADLAKYICENQDS | |
| | | | MLCAADPQWK | | | ISSKLKECCEKPLLE | |
| | | | TDSCQGDSGG | | | KSHCIAEVENDEMPA | |
| | | | PLVCSLQGRM | | | DLPSLAADFVESKDV | |
| | | | TLTGIVSWGR | | | CKNYAEAKDVFLGMF | |
| | | | GCALKDKPGV | | | LYEYARRHPDYSVVL | |
| | | | YTRVSHFLPW | | | LLRLAKTYETTLEKC | |
| | | | IRSHTKEENG | | | CAAADPHECYAKVFD | |
| | | | LAL | | | EFKPLVEEPQNLIKQ | |
| | | | (33-285) | | | NCELFEQLGEYKFQN | |
| | | | | | | ALLVRYTKKVPQVST | |
| | | | | | | PTLVEVSRNLGKVGS | |
| | | | | | | KCCKHPEAKRMPCAE | |
| | | | | | | DYLSVVLNQLCVLHE | |
| | | | | | | KTPVSDRVTKCCTES | |
| | | | | | | LVNRRPCFSALEVDE | |
| | | | | | | TYVPKEFNAETFTFH | |
| | | | | | | ADICTLSEKERQIKK | |
| | | | | | | QTALVELVKHKPKAT | |
| | | | | | | KEQLKAVMDDFAAFV | |
| | | | | | | EKCCKADDKETCFAE | |
| | | | | | | EGKKLVAASQAALGL | |
| | | | | | | (292-876) | |
| 1017 | SUMO- | METDTLLLWV | IIGGEFTTIE | GGSSGG | — | DAHKSEVAHRFKDLG | DGHHHHHHGSLQD |
| | uPA | LLLWVPGSTG | NQPWFAAIYQ | (382-387) | | EENFKALVLIAFAQY | SEVNQEAKPEVKP |
| | (SEQ ID | (1-20) | RYEGGSEYYR | | | LQQCPFEDHVKLVNE | EVKPETHINLKVS |
| | NO: 21)- | | CGGSLISPCW | | | VTEFAKTCVADESAE | DGSSEIFFKIKKT |
| | HSA | | VISATHCFIP | | | NCDKSLHTLFGDKLC | TPLRRLMEAFAKR |
| | | | QPKKEDYIVY | | | TVATLRETYGEMADC | QGKEMDSLTFLYD |
| | | | LGRSRLNSNT | | | CAKQEPERNECFLQH | GIEIQADQTPEDL |
| | | | QGEMKFEVEN | | | KDDNPNLPRLVRPEV | DMEDNDIIAHREQ |
| | | | LILHKDYSAD | | | DVMCTAFHDNEETFL | IGG |
| | | | IAAQHNDIAL | | | KKYLYEIARRHPYFY | (21-128) |
| | | | LKIRSKEGRC | | | APELLFFAKRYKAAF | |
| | | | AQPSRTIQTI | | | TECCQAADKAACLLP | |
| | | | SLPSMYNDPQ | | | KLDELRDEGKASSAK | |
| | | | FGTSCEITGF | | | QRLKCASLQKFGERA | |
| | | | GKENSTDRLY | | | FKAWAVARLSQRFPK | |
| | | | PEQLKMTVVK | | | AEFAEVSKLVTDLTK | |
| | | | LISHRECQQP | | | VHTECCHGDLLECAD | |
| | | | HYYGSEVTTK | | | DRADLAKYICENQDS | |
| | | | MLCAADPQWK | | | ISSKLKECCEKPLLE | |
| | | | TDSCQGDSGG | | | KSHCIAEVENDEMPA | |
| | | | PLVCSLQGRM | | | DLPSLAADFVESKDV | |
| | | | TLTGIVSWGR | | | CKNYAEAKDVFLGMF | |
| | | | GCALKDKPGV | | | LYEYARRHPDYSVVL | |
| | | | YTRVSHFLPW | | | LLRLAKTYETTLEKC | |
| | | | IRSHTKEENG | | | CAAADPHECYAKVFD | |
| | | | LAL | | | EFKPLVEEPQNLIKQ | |
| | | | (129-381) | | | NCELFEQLGEYKFQN | |
| | | | | | | ALLVRYTKKVPQVST | |
| | | | | | | PTLVEVSRNLGKVGS | |
| | | | | | | KCCKHPEAKRMPCAE | |
| | | | | | | DYLSVVLNQLCVLHE | |
| | | | | | | KTPVSDRVTKCCTES | |
| | | | | | | LVNRRPCFSALEVDE | |
| | | | | | | TYVPKEFNAETFTFH | |
| | | | | | | ADICTLSEKERQIKK | |
| | | | | | | QTALVELVKHKPKAT | |
| | | | | | | KEQLKAVMDDFAAFV | |
| | | | | | | EKCCKADDKETCFAE | |
| | | | | | | EGKKLVAASQAALGL | |
| | | | | | | (388-972) | |
| 1018 | SUMO- | METDTLLLWV | IIGGEFTTIE | GGSSGG | — | DKTHTCPPCPAPELL | DGHHHHHHGSLQD |
| | uPA | LLLWVPGSTG | NQPWFAAIYQ | (382-387) | | GGPSVFLFPPKPKDT | SEVNQEAKPEVKP |
| | (SEQ ID | (1-20) | RYEGGSEYYR | | | LMISRTPEVTCVVVD | EVKPETHINLKVS |
| | NO: 21)- | | CGGSLISPCW | | | VSHEDPEVKFNWYVD | DGSSEIFFKIKKT |
| | Fc | | VISATHCFIP | | | GVEVHNAKTKPREEQ | TPLRRLMEAFAKR |
| | | | QPKKEDYIVY | | | YNSTYRVVSVLTVLH | QGKEMDSLTFLYD |
| | | | LGRSRLNSNT | | | QDWLNGKEYKCKVSN | GIEIQADQTPEDL |
| | | | QGEMKFEVEN | | | KALPAPIEKTISKAK | DMEDNDIIEAHRE |
| | | | LILHKDYSAD | | | GQPREPQVYTLPPSR | QIGG |
| | | | IAAQHNDIAL | | | DELTKNQVSLTCLVK | (21-128) |
| | | | LKIRSKEGRC | | | GFYPSDIAVEWESNG | |
| | | | AQPSRTIQTI | | | QPENNYKTTPPVLDS | |
| | | | SLPSMYNDPQ | | | DGSFFLYSKLTVDKS | |
| | | | FGTSCEITGF | | | RWQQGNVFSCSVMHE | |
| | | | GKENSTDRLY | | | ALHNHYTQKSLSLSP | |
| | | | PEQLKMTVVK | | | G | |
| | | | LISHRECQQP | | | (388-613) | |
| | | | HYYGSEVTTK | | | | |
| | | | MLCAADPQWK | | | | |
| | | | TDSCQGDSGG | | | | |
| | | | PLVCSLQGRM | | | | |
| | | | TLTGIVSWGR | | | | |
| | | | GCALKDKPGV | | | | |
| | | | YTRVSHFLPW | | | | |
| | | | IRSHTKEENG | | | | |
| | | | LAL | | | | |
| | | | (129-381) | | | | |
| 1037 | 6xHis- | — | IIGGEFTTIENQ | | — | | MGHHHHHHGSLQD |
| | sumo- | | PWFAAIYQRYEG | | | | SEVNQEAKPEVKP |
| | uPA | | GSEYYRCGGSLI | | | | EVKPETHINLKVS |
| | (SEQ ID | | SPCWVISATHCF | | | | DGSSEIFFKIKKT |
| | NO: 987) | | IPQPKKEDYIVY | | | | TPLRRLMEAFAKR |
| | | | LGRSRLNSNTQG | | | | QGKEMDSLRFLYD |
| | | | EMKFEVENLILH | | | | GIRIQADQAPEDL |
| | | | KDYSADIAAQHN | | | | DMEDNDIIEAHRE |
| | | | DIALLKIRSKEG | | | | QIGG |
| | | | RCAQPSRTIQTI | | | | (1-108) |
| | | | CLPSMYNDPQFG | | | | |
| | | | TSCEITGFGKEN | | | | |
| | | | STDRLYPEQLKM | | | | |
| | | | TVVKLISHRECQ | | | | |
| | | | QPHYYGSEVTTK | | | | |
| | | | MLCAADPQWKTD | | | | |
| | | | SCQGDSGGPLVC | | | | |
| | | | SLQGRMTLTGIV | | | | |
| | | | SWGRGCALKDKP | | | | |
| | | | GVYTRVSHFLPW | | | | |
| | | | IRSHTKEENGLA | | | | |
| | | | L | | | | |
| | | | (109-361) | | | | |
| 1038 | 6xHis | — | IIGGEFTTIENQ | | — | | MGHHHHHHGSLQD |
| | sumo- | | PWFAAIYQRYEG | | | | SEVNQEAKPEVKP |
| | uPA | | GSEYYRCGGSLI | | | | EVKPETHINLKVS |
| | (SEQ ID | | SPCWVISATHCF | | | | DGSSEIFFKIKKT |
| | NO: 21) | | IPQPKKEDYIVY | | | | TPLRRLMEAFAKR |
| | | | LGRSRLNSNTQG | | | | QGKEMDSLRFLYD |
| | | | EMKFEVENLILH | | | | GIRIQADQAPEDL |
| | | | KDYSADIAAQHN | | | | DMEDNDIIEAHRE |
| | | | DIALLKIRSKEG | | | | QIGG |
| | | | RCAQPSRTIQTI | | | | (1-108) |
| | | | SLPSMYNDPQFG | | | | |
| | | | TSCEITGFGKEN | | | | |
| | | | STDRLYPEQLKM | | | | |
| | | | TVVKLISHRECQ | | | | |
| | | | QPHYYGSEVTTK | | | | |
| | | | MLCAADPQWKTD | | | | |
| | | | SCQGDSGGPLVC | | | | |
| | | | SLQGRMTLTGIV | | | | |
| | | | SWGRGCALKDKP | | | | |
| | | | GVYTRVSHFLPW | | | | |
| | | | IRSHTKEENGLA | | | | |
| | | | L | | | | |
| | | | (109-361) | | | | |
| 1039 | 6xHis | — | IIGGEFTTIENQ | | — | GGSCK | MGHHHHHHGSLQD |
| | sum- | | PWFAAIYQRYEG | | | (362-366) | SEVNQEAKPEVKP |
| | uPA | | GSEYYRCGGSLI | | | | EVKPETHINLKVS |
| | (SEQ ID | | SPCWVISATHCF | | | | DGSSEIFFKIKKT |
| | NO: 21)- | | IPQPKKEDYIVY | | | | TPLRRLMEAFAKR |
| | GGSCK | | LGRSRLNSNTQG | | | | QGKEMDSLRFLYD |
| | | | EMKFEVENLILH | | | | GIRIQADQAPEDL |
| | | | KDYSADIAAQHN | | | | DMEDNDIIEAHRE |
| | | | DIALLKIRSKEG | | | | QIGG |
| | | | RCAQPSRTIQTI | | | | (1-108) |
| | | | SLPSMYNDPQFG | | | | |
| | | | TSCEITGFGKEN | | | | |
| | | | STDRLYPEQLKM | | | | |
| | | | TVVKLISHRECQ | | | | |
| | | | QPHYYGSEVTTK | | | | |
| | | | MLCAADPQWKTD | | | | |
| | | | SCQGDSGGPLVC | | | | |
| | | | SLQGRMTLTGIV | | | | |
| | | | SWGRGCALKDKP | | | | |
| | | | GVYTRVSHFLPW | | | | |
| | | | IRSHTKEENGLA | | | | |
| | | | L | | | | |
| | | | (109-361) | | | | |

[0914] FIG. 3 sets forth schematics of the u-PA polypeptides with C-terminal fusions, such as the C-terminal fusion polypeptides set forth in SEQ ID NOS: 1006-1018 and 1036.

[0915] I. Assays for assessing u-PA amounts and complement pathway activity

[0916] The u-PA polypeptide fusions were produced after transfection of the pcDNA3_4 vector encoding altered and native u-PA polypeptide fusion in a mammalian expression system in Expi293™ cells. The u-PA polypeptides that correctly expressed in Expi293™ cells were purified on a HiTrap Protein A HP or CaptureSelect™ Human Albumin Affinity Matrix and processed for bioanalytical assays such as a u-PA ELISA to examine the uPA titers or a C3 FRET proteolytic cleavage assay to examine u-PA polypeptide catalytic activity. The results are set forth in the table below:

| | | Total | | | Proteolytic | Proteolytic |
|---|---|---|---|---|---|---|
| | | amount of | uPA | uPA | activity | activity on |
| SEQ | | protein | ELISA | ELISA | on C3 | C3 relative |
| ID | | from 1L | titer | titer | relative to | to uPA |
| NO: | A280 | culture′ | (mg/L) | (mg/L) | A280 | ELISA titer |
| 1004 | | | 0.4 | 0.4 | | |
| 1005 | | | 149.7 | 75.39 | | |
| 1006 | | | 2.6 | 2.2 | | |
| 1007 | | | 0.3 | 0.3 | | |
| 1008 | | | 0.1 | 0.06 | | |
| 1009 | | | 0.3 | 0.26 | | |
| 1010 | 4.23 | 36.4 mg | 17.3 | 15.89 | 110.36 | 773.05 |
| | mg/ml | | | | | |
| 1011 | 1.69 | 23.0 mg | 19.3 | 21.66 | 0.06 | 0.1 |
| | mg/ml | | | | | |
| 1012 | | | 16.2 | 7.5 | | |
| 1013 | | | 4.7 | 5.46 | | |
| 1036 | 3.32 | 42.5 mg | | | | |
| | mg/ml | | | | | |
| 1014 | | | | | | |
| 1015u | 3.43 | 70.3 mg | | | | |
| | mg/ml | | | | | |
| 1015a | 1.16 | 44.7 mg | | | | |
| | mg/ml | | | | | |
| 1015i | | | | | | |
| 1016 | | | | | | |
| 1017 | 3.32 | 89.3 mg | | | | |
| | mg/ml | | | | | |
| 1018 | 1.10 | 11 mg | | | | |
| | mg/ml | | | | | |

[0917] 1. u-PA ELISA levels

[0918] An enzyme linked immunosorbent assay (ELISA) is used to measure the presence of u-PA polypeptides (see, e.g., Example 15). Typically, the measurement of u-PA is an indirect measure of the binding of u-PA to a capture antibody (PA1-36166 at 1.0 ug/mL, Invitrogen). The captured u-PA polypeptide is then detected with a detection antibody (PA1-36015 at 0.25 ug/mL) which is recognized by the HRP conjugated anti Goat antibody (Rockland, 605-403-B69). The HRP enzyme triggers a colorimetric reaction upon addition of the TMB substrate. Using the u-PA ELISA method, four u-PA polypeptides were identified to express at high uPA titer levels (SEQ ID NOS: 1005, 1010, 1011, 1012, 1015), two u-PA polypeptides at medium titers (SEQ ID NOS: 1006 and 1013), and u-PA polypeptides set forth in SEQ ID NOS: 1004, 1007-1009 did not express.

[0919] 2. Enzyme Activity (Human C3 FRET Peptide).

[0920] The proteolytic activity of uPA polypeptides on human C3 was measured in vitro using a human C3 FRET peptide RHQARASHL EDANS/DABCYL produced by Genscript (lot #94045990005/PE6379) (see, e.g., Example 15). The N-terminal side of the peptide is labeled with a DABCYL fluorophore, and the C-terminal side is labeled with an EDANS fluorophore. Cleavage of the peptide separates the EDANS/DABCYL FRET pair to generate a fluorescent signal, which is measured in a multi-well plate reader. The rate of generation of fluorescence intensity is interpolated against an EDANS standard curve to yield the EDANS product generation rate. The product generation rate is multiplied by the dilution factor to yield a volumetric specific activity in units of nmol product per minute of reaction per mL of sample (nmol/min/mL). The volumetric specific activity indicates the total amount of active enzyme in the sample. The second specific activity is calculated by dividing the volumetric specific activity by the sample enzyme concentration to yield an enzyme specific activity in units of nmol product per minute of reaction per mg of enzyme (nmol/min/mg). The enzyme specific activity indicates the intrinsic activity of uPA polypeptides in the sample regardless of the concentration. Using the human C3 FRET activity assay, uPA polypeptide set forth in SEQ ID NO: 1010 was shown to be active.

[0921] Since modifications will be apparent to those of skill in this art, it is intended that this invention be limited only by the scope of the appended claims.

The application's sequence listing, which the Patent Office published only in electronic form, follows.

SEQUENCE LISTING (1044 sequences)

SEQ ID NO: 1 - protein, 431 aa, Artificial Sequence
  UROKINASE-TYPE PLASMINOGEN ACTIVATOR (u-PA) pro-peptide
MRALLARLLLCVLVVSDSKGSNELHQVPSNCDCLNGGTCVSNKYFSNIHWCNCPKKFGGQHCEIDKSKTCYEGNGHFYRGKASTDTMGRPCLPWNSATVLQQTYHAHRSDALQLGLGKHNYCRNPDNRRRPWCYVQVGLKPLVQECMVHDCADGKKPSSPPEELKFQCGQKTLRPRFKIIGGEFTTIENQPWFAAIYRRHRGGSVTYVCGGSLISPCWVISATHCFIDYPKKEDYIVYLGRSRLNSNTQGEMKFEVENLILHKDYSADTLAHHNDIALLKIRSKEGRCAQPSRTIQTICLPSMYNDPQFGTSCEITGFGKENSTDYLYPEQLKMTVVKLISHRECQQPHYYGSEVTTKMLCAADPQWKTDSCQGDSGGPLVCSLQGRMTLTGIVSWGRGCALKDKPGVYTRVSHFLPWIRSHTKEENGLAL

SEQ ID NO: 2 - protein, 253 aa, Artificial Sequence
  UROKINASE-TYPE PLASMINOGEN ACTIVATOR (u-PA) protease domain
IIGGEFTTIENQPWFAAIYRRHRGGSVTYVCGGSLISPCWVISATHCFIDYPKKEDYIVYLGRSRLNSNTQGEMKFEVENLILHKDYSADTLAHHNDIALLKIRSKEGRCAQPSRTIQTICLPSMYNDPQFGTSCEITGFGKENSTDYLYPEQLKMTVVKLISHRECQQPHYYGSEVTTKMLCAADPQWKTDSCQGDSGGPLVCSLQGRMTLTGIVSWGRGCALKDKPGVYTRVSHFLPWIRSHTKEENGLAL

SEQ ID NO: 3 - protein, 411 aa, Artificial Sequence
  UROKINASE-TYPE PLASMINOGEN ACTIVATOR (u-PA) mature
SNELHQVPSNCDCLNGGTCVSNKYFSNIHWCNCPKKFGGQHCEIDKSKTCYEGNGHFYRGKASTDTMGRPCLPWNSATVLQQTYHAHRSDALQLGLGKHNYCRNPDNRRRPWCYVQVGLKPLVQECMVHDCADGKKPSSPPEELKFQCGQKTLRPRFKIIGGEFTTIENQPWFAAIYRRHRGGSVTYVCGGSLISPCWVISATHCFIDYPKKEDYIVYLGRSRLNSNTQGEMKFEVENLILHKDYSADTLAHHNDIALLKIRSKEGRCAQPSRTIQTICLPSMYNDPQFGTSCEITGFGKENSTDYLYPEQLKMTVVKLISHRECQQPHYYGSEVTTKMLCAADPQWKTDSCQGDSGGPLVCSLQGRMTLTGIVSWGRGCALKDKPGVYTRVSHFLPWIRSHTKEENGLAL

SEQ ID NO: 4 - protein, 431 aa, Artificial Sequence
  urokinase plasminogen activator (u-PA) pro-peptide C122S
MRALLARLLLCVLVVSDSKGSNELHQVPSNCDCLNGGTCVSNKYFSNIHWCNCPKKFGGQHCEIDKSKTCYEGNGHFYRGKASTDTMGRPCLPWNSATVLQQTYHAHRSDALQLGLGKHNYSRNPDNRRRPWCYVQVGLKPLVQECMVHDCADGKKPSSPPEELKFQCGQKTLRPRFKIIGGEFTTIENQPWFAAIYRRHRGGSVTYVCGGSLISPCWVISATHCFIDYPKKEDYIVYLGRSRLNSNTQGEMKFEVENLILHKDYSADTLAHHNDIALLKIRSKEGRCAQPSRTIQTISLPSMYNDPQFGTSCEITGFGKENSTDYLYPEQLKMTVVKLISHRECQQPHYYGSEVTTKMLCAADPQWKTDSCQGDSGGPLVCSLQGRMTLTGIVSWGRGCALKDKPGVYTRVSHFLPWIRSHTKEENGLAL

SEQ ID NO: 5 - protein, 253 aa, Artificial Sequence
  UROKINASE-TYPE PLASMINOGEN ACTIVATOR (u-PA) protease domain C122S
IIGGEFTTIENQPWFAAIYRRHRGGSVTYVCGGSLISPCWVISATHCFIDYPKKEDYIVYLGRSRLNSNTQGEMKFEVENLILHKDYSADTLAHHNDIALLKIRSKEGRCAQPSRTIQTISLPSMYNDPQFGTSCEITGFGKENSTDYLYPEQLKMTVVKLISHRECQQPHYYGSEVTTKMLCAADPQWKTDSCQGDSGGPLVCSLQGRMTLTGIVSWGRGCALKDKPGVYTRVSHFLPWIRSHTKEENGLAL

SEQ ID NO: 6 - protein, 411 aa, Artificial Sequence
  UROKINASE-TYPE PLASMINOGEN ACTIVATOR (u-PA) mature C122S
SNELHQVPSNCDCLNGGTCVSNKYFSNIHWCNCPKKFGGQHCEIDKSKTCYEGNGHFYRGKASTDTMGRPCLPWNSATVLQQTYHAHRSDALQLGLGKHNYCRNPDNRRRPWCYVQVGLKPLVQECMVHDCADGKKPSSPPEELKFQCGQKTLRPRFKIIGGEFTTIENQPWFAAIYRRHRGGSVTYVCGGSLISPCWVISATHCFIDYPKKEDYIVYLGRSRLNSNTQGEMKFEVENLILHKDYSADTLAHHNDIALLKIRSKEGRCAQPSRTIQTISLPSMYNDPQFGTSCEITGFGKENSTDYLYPEQLKMTVVKLISHRECQQPHYYGSEVTTKMLCAADPQWKTDSCQGDSGGPLVCSLQGRMTLTGIVSWGRGCALKDKPGVYTRVSHFLPWIRSHTKEENGLAL

SEQ ID NO: 7 - DNA, 1296 bp, Artificial Sequence
  UROKINASE-TYPE PLASMINOGEN ACTIVATOR (u-PA) pro-peptide
atgagagccctgctggcgcgcctgcttctctgcgtcctggtcgtgagcgactccaaaggcagcaatgaacttcatcaagttccatcgaactgtgactgtctaaatggaggaacatgtgtgtccaacaagtacttctccaacattcactggtgcaactgcccaaagaaattcggagggcagcactgtgaaatagataagtcaaaaacctgctatgaggggaatggtcacttttaccgaggaaaggccagcactgacaccatgggccggccctgcctgccctggaactctgccactgtccttcagcaaacgtaccatgcccacagatctgatgctcttcagctgggcctggggaaacataattactgcaggaacccagacaaccggaggcgaccctggtgctatgtgcaggtgggcctaaagccgcttgtccaagagtgcatggtgcatgactgcgcagatggaaaaaagccctcctctcctccagaagaattaaaatttcagtgtggccaaaagactctgaggccccgctttaagattattgggggagaattcaccaccatcgagaaccagccctggtttgcggccatctacaggaggcaccgggggggctctgtcacctacgtgtgtggaggcagcctcatcagcccttgctgggtgatcagcgccacacactgcttcattgattacccaaagaaggaggactacatcgtctacctgggtcgctcaaggcttaactccaacacgcaaggggagatgaagtttgaggtggaaaacctcatcctacacaaggactacagcgctgacacgcttgctcaccacaacgacattgccttgctgaagatccgttccaaggagggcaggtgtgcgcagccatcccggactatacagaccatctgcctgccctcgatgtataacgatccccagtttggcacaagctgtgagatcactggctttggaaaagagaattctaccgactatctctatccggagcagctgaaaatgactgttgtgaagctgatttcccaccgggagtgtcagcagccccactactacggctctgaagtcaccaccaaaatgctgtgtgctgctgacccacagtggaaaacagattcctgccagggagactcagggggacccctcgtctgttccctccaaggccgcatgactttgactggaattgtgagctggggccgtggatgtgccctgaaggacaagccaggcgtctacacgagagtctcacacttcttaccctggatccgcagtcacaccaaggaagagaatggcctggccctctga

SEQ ID NO: 8 - protein, 253 aa, Artificial Sequence
  UROKINASE-TYPE PLASMINOGEN ACTIVATOR (u-PA) protease domain F30Y/V38D/Y40H/V41R/L97bA/H99Q/C122S/M157K
IIGGEFTTIENQPWYAAIYRRHRGGSDTHRCGGSLISPCWVISATHCFIDYPKKEDYIVYLGRSRLNSNTQGEMKFEVENLILHKDYSADTAAQHNDIALLKIRSKEGRCAQPSRTIQTISLPSMYNDPQFGTSCEITGFGKENSTDYLYPEQLKKTVVKLISHRECQQPHYYGSEVTTKMLCAADPQWKTDSCQGDSGGPLVCSLQGRMTLTGIVSWGRGCALKDKPGVYTRVSHFLPWIRSHTKEENGLAL

SEQ ID NO: 9 - protein, 253 aa, Artificial Sequence
  UROKINASE-TYPE PLASMINOGEN ACTIVATOR (u-PA) protease domain F30Y/R35W/R36H/H37E/V38E/T39W/Y40H/V41R/Y60bQ/T97a E/L97bA/H99Q/C122S/Y149K/M157K
IIGGEFTTIENQPWYAAIYWHERGGSEWHRCGGSLISPCWVISATHCFIDQPKKEDYIVYLGRSRLNSNTQGEMKFEVENLILHKDYSADEAAQHNDIALLKIRSKEGRCAQPSRTIQTISLPSMYNDPQFGTSCEITGFGKENSTDKLYPEQLKKTVVKLISHRECQQPHYYGSEVTTKMLCAADPQWKTDSCQGDSGGPLVCSLQGRMTLTGIVSWGRGCALKDKPGVYTRVSHFLPWIRSHTKEENGLAL

SEQ ID NO: 10 - protein, 253 aa, Artificial Sequence
  UROKINASE-TYPE PLASMINOGEN ACTIVATOR (u-PA) protease domain F30Y/R35W/R36H/H37D/V38E/T39Y/Y40F/V41R/T97aI/L97b A/H99Q/C122S/Y149R/M157K
IIGGEFTTIENQPWYAAIYWHDRGGSEYFRCGGSLISPCWVISATHCFIDYPKKEDYIVYLGRSRLNSNTQGEMKFEVENLILHKDYSADIAAQHNDIALLKIRSKEGRCAQPSRTIQTISLPSMYNDPQFGTSCEITGFGKENSTDRLYPEQLKKTVVKLISHRECQQPHYYGSEVTTKMLCAADPQWKTDSCQGDSGGPLVCSLQGRMTLTGIVSWGRGCALKDKPGVYTRVSHFLPWIRSHTKEENGLAL

SEQ ID NO: 11 - protein, 253 aa, Artificial Sequence
  UROKINASE-TYPE PLASMINOGEN ACTIVATOR (u-PA) protease domain R35W/R36H/H37N/V38E/T39F/Y40F/V41R/T97aI/L97bA/H99 Q/C122S/Y149R/M157K/Q192H
IIGGEFTTIENQPWFAAIYWHNRGGSEFFRCGGSLISPCWVISATHCFIDYPKKEDYIVYLGRSRLNSNTQGEMKFEVENLILHKDYSADIAAQHNDIALLKIRSKEGRCAQPSRTIQTISLPSMYNDPQFGTSCEITGFGKENSTDRLYPEQLKKTVVKLISHRECQQPHYYGSEVTTKMLCAADPQWKTDSCHGDSGGPLVCSLQGRMTLTGIVSWGRGCALKDKPGVYTRVSHFLPWIRSHTKEENGLAL

SEQ ID NO: 12 - protein, 253 aa, Artificial Sequence
  UROKINASE-TYPE PLASMINOGEN ACTIVATOR (u-PA) protease domain F30Y/R35Y/R36H/H37K/V38E/T39F/Y40F/V41R/T97aI/L97b A/H99Q/C122S/Y149R/M157K
IIGGEFTTIENQPWYAAIYYHKRGGSEFFRCGGSLISPCWVISATHCFIDYPKKEDYIVYLGRSRLNSNTQGEMKFEVENLILHKDYSADIAAQHNDIALLKIRSKEGRCAQPSRTIQTISLPSMYNDPQFGTSCEITGFGKENSTDRLYPEQLKKTVVKLISHRECQQPHYYGSEVTTKMLCAADPQWKTDSCQGDSGGPLVCSLQGRMTLTGIVSWGRGCALKDKPGVYTRVSHFLPWIRSHTKEENGLAL

SEQ ID NO: 13 - protein, 253 aa, Artificial Sequence
  UROKINASE-TYPE PLASMINOGEN ACTIVATOR (u-PA) protease domain F30Y/R35W/R36H/H37N/V38E/T39Y/Y40F/V41R/Y60bS/T97a E/L97bA/H99Q/C122S/Y149K/M157K
IIGGEFTTIENQPWYAAIYWHNRGGSEYFRCGGSLISPCWVISATHCFIDSPKKEDYIVYLGRSRLNSNTQGEMKFEVENLILHKDYSADEAAQHNDIALLKIRSKEGRCAQPSRTIQTISLPSMYNDPQFGTSCEITGFGKENSTDKLYPEQLKKTVVKLISHRECQQPHYYGSEVTTKMLCAADPQWKTDSCQGDSGGPLVCSLQGRMTLTGIVSWGRGCALKDKPGVYTRVSHFLPWIRSHTKEENGLAL

SEQ ID NO: 14 - protein, 253 aa, Artificial Sequence
  UROKINASE-TYPE PLASMINOGEN ACTIVATOR (u-PA) protease domain F30Y/R35W/R36H/H37P/V38E/T39Y/Y40F/V41R/Y60bS/T97a E/L97bA/H99Q/C122S/Y149K/M157K
IIGGEFTTIENQPWYAAIYWHPRGGSEYFRCGGSLISPCWVISATHCFIDSPKKEDYIVYLGRSRLNSNTQGEMKFEVENLILHKDYSADEAAQHNDIALLKIRSKEGRCAQPSRTIQTISLPSMYNDPQFGTSCEITGFGKENSTDKLYPEQLKKTVVKLISHRECQQPHYYGSEVTTKMLCAADPQWKTDSCQGDSGGPLVCSLQGRMTLTGIVSWGRGCALKDKPGVYTRVSHFLPWIRSHTKEENGLAL

SEQ ID NO: 15 - protein, 253 aa, Artificial Sequence
  UROKINASE-TYPE PLASMINOGEN ACTIVATOR (u-PA) protease domain V38E/Y40Q/V41L/Y60bL/L97bA/H99Q/C122S
IIGGEFTTIENQPWFAAIYRRHRGGSETQLCGGSLISPCWVISATHCFIDLPKKEDYIVYLGRSRLNSNTQGEMKFEVENLILHKDYSADTAAQHNDIALLKIRSKEGRCAQPSRTIQTISLPSMYNDPQFGTSCEITGFGKENSTDYLYPEQLKMTVVKLISHRECQQPHYYGSEVTTKMLCAADPQWKTDSCQGDSGGPLVCSLQGRMTLTGIVSWGRGCALKDKPGVYTRVSHFLPWIRSHTKEENGLAL

SEQ ID NO: 16 - protein, 253 aa, Artificial Sequence
  UROKINASE-TYPE PLASMINOGEN ACTIVATOR (u-PA) protease domain F30Y/R35Q/R36H/H37G/R37aE/V38E/T39F/Y40F/V41R/D60a P/Y60bS/T97aI/L97bA/H99Q/C122S/Y149R/M157K
IIGGEFTTIENQPWYAAIYQHGEGGSEFFRCGGSLISPCWVISATHCFIPSPKKEDYIVYLGRSRLNSNTQGEMKFEVENLILHKDYSADIAAQHNDIALLKIRSKEGRCAQPSRTIQTISLPSMYNDPQFGTSCEITGFGKENSTDRLYPEQLKKTVVKLISHRECQQPHYYGSEVTTKMLCAADPQWKTDSCQGDSGGPLVCSLQGRMTLTGIVSWGRGCALKDKPGVYTRVSHFLPWIRSHTKEENGLAL

SEQ ID NO: 17 - protein, 253 aa, Artificial Sequence
  UROKINASE-TYPE PLASMINOGEN ACTIVATOR (u-PA) protease domain F30Y/R35Y/R36H/H37P/R37aQ/V38E/T39Y/Y40F/V41R/Y60b H/T97aI/L97bA/H99Q/C122S/Y149R/M157K
IIGGEFTTIENQPWYAAIYYHPQGGSEYFRCGGSLISPCWVISATHCFIDHPKKEDYIVYLGRSRLNSNTQGEMKFEVENLILHKDYSADIAAQHNDIALLKIRSKEGRCAQPSRTIQTISLPSMYNDPQFGTSCEITGFGKENSTDRLYPEQLKKTVVKLISHRECQQPHYYGSEVTTKMLCAADPQWKTDSCQGDSGGPLVCSLQGRMTLTGIVSWGRGCALKDKPGVYTRVSHFLPWIRSHTKEENGLAL

SEQ ID NO: 18 - protein, 253 aa, Artificial Sequence
  UROKINASE-TYPE PLASMINOGEN ACTIVATOR (u-PA) protease domain R35Q/H37Y/R37aE/V38E/T39Y/V41R/D60aT/Y60bT/T97aI/L 97bA/H99Q/C122S/Y149R
IIGGEFTTIENQPWFAAIYQRYEGGSEYYRCGGSLISPCWVISATHCFITTPKKEDYIVYLGRSRLNSNTQGEMKFEVENLILHKDYSADIAAQHNDIALLKIRSKEGRCAQPSRTIQTISLPSMYNDPQFGTSCEITGFGKENSTDRLYPEQLKMTVVKLISHRECQQPHYYGSEVTTKMLCAADPQWKTDSCQGDSGGPLVCSLQGRMTLTGIVSWGRGCALKDKPGVYTRVSHFLPWIRSHTKEENGLAL

SEQ ID NO: 19 - protein, 253 aa, Artificial Sequence
  UROKINASE-TYPE PLASMINOGEN ACTIVATOR (u-PA) protease domain R35W/H37P/R37aN/V38E/T39Y/V41R/D60aP/Y60bL/T97aI/L 97bA/H99Q/C122S/Y149R
IIGGEFTTIENQPWFAAIYWRPNGGSEYYRCGGSLISPCWVISATHCFIPLPKKEDYIVYLGRSRLNSNTQGEMKFEVENLILHKDYSADIAAQHNDIALLKIRSKEGRCAQPSRTIQTISLPSMYNDPQFGTSCEITGFGKENSTDRLYPEQLKMTVVKLISHRECQQPHYYGSEVTTKMLCAADPQWKTDSCQGDSGGPLVCSLQGRMTLTGIVSWGRGCALKDKPGVYTRVSHFLPWIRSHTKEENGLAL

SEQ ID NO: 20 - protein, 253 aa, Artificial Sequence
  UROKINASE-TYPE PLASMINOGEN ACTIVATOR (u-PA) protease domain R35W/H37D/R37aP/V38E/T39W/V41R/Y60bA/T97aI/L97bA/H 99Q/C122S/Y149R
IIGGEFTTIENQPWFAAIYWRDPGGSEWYRCGGSLISPCWVISATHCFIDAPKKEDYIVYLGRSRLNSNTQGEMKFEVENLILHKDYSADIAAQHNDIALLKIRSKEGRCAQPSRTIQTISLPSMYNDPQFGTSCEITGFGKENSTDRLYPEQLKMTVVKLISHRECQQPHYYGSEVTTKMLCAADPQWKTDSCQGDSGGPLVCSLQGRMTLTGIVSWGRGCALKDKPGVYTRVSHFLPWIRSHTKEENGLAL

SEQ ID NO: 21 - protein, 253 aa, Artificial Sequence
  UROKINASE-TYPE PLASMINOGEN ACTIVATOR (u-PA) protease domain R35Q/H37Y/R37aE/V38E/T39Y/V41R/D60aP/Y60bQ/T97aI/L 97bA/H99Q/C122S/Y149R
IIGGEFTTIENQPWFAAIYQRYEGGSEYYRCGGSLISPCWVISATHCFIPQPKKEDYIVYLGRSRLNSNTQGEMKFEVENLILHKDYSADIAAQHNDIALLKIRSKEGRCAQPSRTIQTISLPSMYNDPQFGTSCEITGFGKENSTDRLYPEQLKMTVVKLISHRECQQPHYYGSEVTTKMLCAADPQWKTDSCQGDSGGPLVCSLQGRMTLTGIVSWGRGCALKDKPGVYTRVSHFLPWIRSHTKEENGLAL

SEQ ID NO: 22 - protein, 253 aa, Artificial Sequence
  UROKINASE-TYPE PLASMINOGEN ACTIVATOR (u-PA) protease domain H37Y/R37aE/V38E/T39Y/V41R/D60aP/Y60bQ/T97aI/L97bA/ H99Q/C122S/Y149R
IIGGEFTTIENQPWFAAIYRRYEGGSEYYRCGGSLISPCWVISATHCFIPQPKKEDYIVYLGRSRLNSNTQGEMKFEVENLILHKDYSADIAAQHNDIALLKIRSKEGRCAQPSRTIQTISLPSMYNDPQFGTSCEITGFGKENSTDRLYPEQLKMTVVKLISHRECQQPHYYGSEVTTKMLCAADPQWKTDSCQGDSGGPLVCSLQGRMTLTGIVSWGRGCALKDKPGVYTRVSHFLPWIRSHTKEENGLAL

SEQ ID NO: 23 - protein, 253 aa, Artificial Sequence
  UROKINASE-TYPE PLASMINOGEN ACTIVATOR (u-PA) protease domain R35Q/R37aE/V38E/T39Y/V41R/D60aP/Y60bQ/T97aI/L97bA/ H99Q/C122S/Y149R
IIGGEFTTIENQPWFAAIYQRHEGGSEYYRCGGSLISPCWVISATHCFIPQPKKEDYIVYLGRSRLNSNTQGEMKFEVENLILHKDYSADIAAQHNDIALLKIRSKEGRCAQPSRTIQTISLPSMYNDPQFGTSCEITGFGKENSTDRLYPEQLKMTVVKLISHRECQQPHYYGSEVTTKMLCAADPQWKTDSCQGDSGGPLVCSLQGRMTLTGIVSWGRGCALKDKPGVYTRVSHFLPWIRSHTKEENGLAL

SEQ ID NO: 24 - protein, 253 aa, Artificial Sequence
  UROKINASE-TYPE PLASMINOGEN ACTIVATOR (u-PA) protease domain R35Q/H37Y/V38E/T39Y/V41R/D60aP/Y60bQ/T97aI/L97bA/H 99Q/C122S/Y149R
IIGGEFTTIENQPWFAAIYQRYRGGSEYYRCGGSLISPCWVISATHCFIPQPKKEDYIVYLGRSRLNSNTQGEMKFEVENLILHKDYSADIAAQHNDIALLKIRSKEGRCAQPSRTIQTISLPSMYNDPQFGTSCEITGFGKENSTDRLYPEQLKMTVVKLISHRECQQPHYYGSEVTTKMLCAADPQWKTDSCQGDSGGPLVCSLQGRMTLTGIVSWGRGCALKDKPGVYTRVSHFLPWIRSHTKEENGLAL

SEQ ID NO: 25 - protein, 253 aa, Artificial Sequence
  UROKINASE-TYPE PLASMINOGEN ACTIVATOR (u-PA) protease domain R35Q/H37Y/R37aE/T39Y/V41R/D60aP/Y60bQ/T97aI/L97bA/ H99Q/C122S/Y149R
IIGGEFTTIENQPWFAAIYQRYEGGSVYYRCGGSLISPCWVISATHCFIPQPKKEDYIVYLGRSRLNSNTQGEMKFEVENLILHKDYSADIAAQHNDIALLKIRSKEGRCAQPSRTIQTISLPSMYNDPQFGTSCEITGFGKENSTDRLYPEQLKMTVVKLISHRECQQPHYYGSEVTTKMLCAADPQWKTDSCQGDSGGPLVCSLQGRMTLTGIVSWGRGCALKDKPGVYTRVSHFLPWIRSHTKEENGLAL

SEQ ID NO: 26 - protein, 253 aa, Artificial Sequence
  UROKINASE-TYPE PLASMINOGEN ACTIVATOR (u-PA) protease domain R35Q/H37Y/R37aE/V38E/V41R/D60aP/Y60bQ/T97aI/L97bA/ H99Q/C122S/Y149R
IIGGEFTTIENQPWFAAIYQRYEGGSETYRCGGSLISPCWVISATHCFIPQPKKEDYIVYLGRSRLNSNTQGEMKFEVENLILHKDYSADIAAQHNDIALLKIRSKEGRCAQPSRTIQTISLPSMYNDPQFGTSCEITGFGKENSTDRLYPEQLKMTVVKLISHRECQQPHYYGSEVTTKMLCAADPQWKTDSCQGDSGGPLVCSLQGRMTLTGIVSWGRGCALKDKPGVYTRVSHFLPWIRSHTKEENGLAL

SEQ ID NO: 27 - protein, 253 aa, Artificial Sequence
  UROKINASE-TYPE PLASMINOGEN ACTIVATOR (u-PA) protease domain R35Q/H37Y/R37aE/V38E/T39Y/D60aP/Y60bQ/T97aI/L97bA/ H99Q/C122S/Y149R
IIGGEFTTIENQPWFAAIYQRYEGGSEYYVCGGSLISPCWVISATHCFIPQPKKEDYIVYLGRSRLNSNTQGEMKFEVENLILHKDYSADIAAQHNDIALLKIRSKEGRCAQPSRTIQTISLPSMYNDPQFGTSCEITGFGKENSTDRLYPEQLKMTVVKLISHRECQQPHYYGSEVTTKMLCAADPQWKTDSCQGDSGGPLVCSLQGRMTLTGIVSWGRGCALKDKPGVYTRVSHFLPWIRSHTKEENGLAL

SEQ ID NO: 28 - protein, 253 aa, Artificial Sequence
  UROKINASE-TYPE PLASMINOGEN ACTIVATOR (u-PA) protease domain R35Q/H37Y/R37aE/V38E/T39Y/V41R/Y60bQ/T97aI/L97bA/H 99Q/C122S/Y149R
IIGGEFTTIENQPWFAAIYQRYEGGSEYYRCGGSLISPCWVISATHCFIDQPKKEDYIVYLGRSRLNSNTQGEMKFEVENLILHKDYSADIAAQHNDIALLKIRSKEGRCAQPSRTIQTISLPSMYNDPQFGTSCEITGFGKENSTDRLYPEQLKMTVVKLISHRECQQPHYYGSEVTTKMLCAADPQWKTDSCQGDSGGPLVCSLQGRMTLTGIVSWGRGCALKDKPGVYTRVSHFLPWIRSHTKEENGLAL

SEQ ID NO: 29 - protein, 253 aa, Artificial Sequence
  UROKINASE-TYPE PLASMINOGEN ACTIVATOR (u-PA) protease domain R35Q/H37Y/R37aE/V38E/T39Y/V41R/D60aP/T97aI/L97bA/H 99Q/C122S/Y149R
IIGGEFTTIENQPWFAAIYQRYEGGSEYYRCGGSLISPCWVISATHCFIPYPKKEDYIVYLGRSRLNSNTQGEMKFEVENLILHKDYSADIAAQHNDIALLKIRSKEGRCAQPSRTIQTISLPSMYNDPQFGTSCEITGFGKENSTDRLYPEQLKMTVVKLISHRECQQPHYYGSEVTTKMLCAADPQWKTDSCQGDSGGPLVCSLQGRMTLTGIVSWGRGCALKDKPGVYTRVSHFLPWIRSHTKEENGLAL

SEQ ID NO: 30 - protein, 253 aa, Artificial Sequence
  UROKINASE-TYPE PLASMINOGEN ACTIVATOR (u-PA) protease domain R35Q/H37Y/R37aE/V38E/T39Y/V41R/D60aP/Y60bQ/L97bA/H 99Q/C122S/Y149R
IIGGEFTTIENQPWFAAIYQRYEGGSEYYRCGGSLISPCWVISATHCFIPQPKKEDYIVYLGRSRLNSNTQGEMKFEVENLILHKDYSADTAAQHNDIALLKIRSKEGRCAQPSRTIQTISLPSMYNDPQFGTSCEITGFGKENSTDRLYPEQLKMTVVKLISHRECQQPHYYGSEVTTKMLCAADPQWKTDSCQGDSGGPLVCSLQGRMTLTGIVSWGRGCALKDKPGVYTRVSHFLPWIRSHTKEENGLAL

SEQ ID NO: 31 - protein, 253 aa, Artificial Sequence
  UROKINASE-TYPE PLASMINOGEN ACTIVATOR (u-PA) protease domain R35Q/H37Y/R37aE/V38E/T39Y/V41R/D60aP/Y60bQ/T97aI/H 99Q/C122S/Y149R
IIGGEFTTIENQPWFAAIYQRYEGGSEYYRCGGSLISPCWVISATHCFIPQPKKEDYIVYLGRSRLNSNTQGEMKFEVENLILHKDYSADILAQHNDIALLKIRSKEGRCAQPSRTIQTISLPSMYNDPQFGTSCEITGFGKENSTDRLYPEQLKMTVVKLISHRECQQPHYYGSEVTTKMLCAADPQWKTDSCQGDSGGPLVCSLQGRMTLTGIVSWGRGCALKDKPGVYTRVSHFLPWIRSHTKEENGLAL

SEQ ID NO: 32 - protein, 253 aa, Artificial Sequence
  UROKINASE-TYPE PLASMINOGEN ACTIVATOR (u-PA) protease domain R35Q/H37Y/R37aE/V38E/T39Y/V41R/D60aP/Y60bQ/T97aI/L 97bA/C122S/Y149R
IIGGEFTTIENQPWFAAIYQRYEGGSEYYRCGGSLISPCWVISATHCFIPQPKKEDYIVYLGRSRLNSNTQGEMKFEVENLILHKDYSADIAAHHNDIALLKIRSKEGRCAQPSRTIQTISLPSMYNDPQFGTSCEITGFGKENSTDRLYPEQLKMTVVKLISHRECQQPHYYGSEVTTKMLCAADPQWKTDSCQGDSGGPLVCSLQGRMTLTGIVSWGRGCALKDKPGVYTRVSHFLPWIRSHTKEENGLAL

SEQ ID NO: 33 - protein, 253 aa, Artificial Sequence
  UROKINASE-TYPE PLASMINOGEN ACTIVATOR (u-PA) protease domain R35Q/H37Y/R37aE/V38E/T39Y/V41R/D60aP/Y60bQ/T97aI/L 97bA/H99Q/C122S
IIGGEFTTIENQPWFAAIYQRYEGGSEYYRCGGSLISPCWVISATHCFIPQPKKEDYIVYLGRSRLNSNTQGEMKFEVENLILHKDYSADIAAQHNDIALLKIRSKEGRCAQPSRTIQTISLPSMYNDPQFGTSCEITGFGKENSTDYLYPEQLKMTVVKLISHRECQQPHYYGSEVTTKMLCAADPQWKTDSCQGDSGGPLVCSLQGRMTLTGIVSWGRGCALKDKPGVYTRVSHFLPWIRSHTKEENGLAL

SEQ ID NO: 34 - protein, 253 aa, Artificial Sequence
  UROKINASE-TYPE PLASMINOGEN ACTIVATOR (u-PA) protease domain Y40Q/V41L/Y60bL/L97bA/H99Q/C122S
IIGGEFTTIENQPWFAAIYRRHRGGSVTQLCGGSLISPCWVISATHCFIDLPKKEDYIVYLGRSRLNSNTQGEMKFEVENLILHKDYSADTAAQHNDIALLKIRSKEGRCAQPSRTIQTISLPSMYNDPQFGTSCEITGFGKENSTDYLYPEQLKMTVVKLISHRECQQPHYYGSEVTTKMLCAADPQWKTDSCQGDSGGPLVCSLQGRMTLTGIVSWGRGCALKDKPGVYTRVSHFLPWIRSHTKEENGLAL

SEQ ID NO: 35 - protein, 253 aa, Artificial Sequence
  UROKINASE-TYPE PLASMINOGEN ACTIVATOR (u-PA) protease domain V38E/Y40Q/Y60bL/L97bA/H99Q/C122S
IIGGEFTTIENQPWFAAIYRRHRGGSETQVCGGSLISPCWVISATHCFIDLPKKEDYIVYLGRSRLNSNTQGEMKFEVENLILHKDYSADTAAQHNDIALLKIRSKEGRCAQPSRTIQTISLPSMYNDPQFGTSCEITGFGKENSTDYLYPEQLKMTVVKLISHRECQQPHYYGSEVTTKMLCAADPQWKTDSCQGDSGGPLVCSLQGRMTLTGIVSWGRGCALKDKPGVYTRVSHFLPWIRSHTKEENGLAL

SEQ ID NO: 36 - protein, 253 aa, Artificial Sequence
  UROKINASE-TYPE PLASMINOGEN ACTIVATOR (u-PA) protease domain V38E/Y40Q/V41L/L97bA/H99Q/C122S
IIGGEFTTIENQPWFAAIYRRHRGGSETQLCGGSLISPCWVISATHCFIDYPKKEDYIVYLGRSRLNSNTQGEMKFEVENLILHKDYSADTAAQHNDIALLKIRSKEGRCAQPSRTIQTISLPSMYNDPQFGTSCEITGFGKENSTDYLYPEQLKMTVVKLISHRECQQPHYYGSEVTTKMLCAADPQWKTDSCQGDSGGPLVCSLQGRMTLTGIVSWGRGCALKDKPGVYTRVSHFLPWIRSHTKEENGLAL

SEQ ID NO: 37 - protein, 253 aa, Artificial Sequence
  UROKINASE-TYPE PLASMINOGEN ACTIVATOR (u-PA) protease domain V38E/Y40Q/V41L/Y60bL/H99Q/C122S
IIGGEFTTIENQPWFAAIYRRHRGGSETQLCGGSLISPCWVISATHCFIDLPKKEDYIVYLGRSRLNSNTQGEMKFEVENLILHKDYSADTLAQHNDIALLKIRSKEGRCAQPSRTIQTISLPSMYNDPQFGTSCEITGFGKENSTDYLYPEQLKMTVVKLISHRECQQPHYYGSEVTTKMLCAADPQWKTDSCQGDSGGPLVCSLQGRMTLTGIVSWGRGCALKDKPGVYTRVSHFLPWIRSHTKEENGLAL

SEQ ID NO: 38 - protein, 253 aa, Artificial Sequence
  UROKINASE-TYPE PLASMINOGEN ACTIVATOR (u-PA) protease domain V38E/Y40Q/V41L/Y60bL/L97bA/C122S
IIGGEFTTIENQPWFAAIYRRHRGGSETQLCGGSLISPCWVISATHCFIDLPKKEDYIVYLGRSRLNSNTQGEMKFEVENLILHKDYSADTAAHHNDIALLKIRSKEGRCAQPSRTIQTISLPSMYNDPQFGTSCEITGFGKENSTDYLYPEQLKMTVVKLISHRECQQPHYYGSEVTTKMLCAADPQWKTDSCQGDSGGPLVCSLQGRMTLTGIVSWGRGCALKDKPGVYTRVSHFLPWIRSHTKEENGLAL

SEQ ID NO: 39 - protein, 253 aa, Artificial Sequence
  UROKINASE-TYPE PLASMINOGEN ACTIVATOR (u-PA) protease domain Y40Q/V41L/L97bA/H99Q/C122S
IIGGEFTTIENQPWFAAIYRRHRGGSVTQLCGGSLISPCWVISATHCFIDYPKKEDYIVYLGRSRLNSNTQGEMKFEVENLILHKDYSADTAAQHNDIALLKIRSKEGRCAQPSRTIQTISLPSMYNDPQFGTSCEITGFGKENSTDYLYPEQLKMTVVKLISHRECQQPHYYGSEVTTKMLCAADPQWKTDSCQGDSGGPLVCSLQGRMTLTGIVSWGRGCALKDKPGVYTRVSHFLPWIRSHTKEENGLAL

SEQ ID NO: 40 - protein, 253 aa, Artificial Sequence
  UROKINASE-TYPE PLASMINOGEN ACTIVATOR (u-PA) protease domain Y40Q/V41L/L97bA/C122S
IIGGEFTTIENQPWFAAIYRRHRGGSVTQLCGGSLISPCWVISATHCFIDYPKKEDYIVYLGRSRLNSNTQGEMKFEVENLILHKDYSADTAAHHNDIALLKIRSKEGRCAQPSRTIQTISLPSMYNDPQFGTSCEITGFGKENSTDYLYPEQLKMTVVKLISHRECQQPHYYGSEVTTKMLCAADPQWKTDSCQGDSGGPLVCSLQGRMTLTGIVSWGRGCALKDKPGVYTRVSHFLPWIRSHTKEENGLAL

SEQ ID NO: 41 - protein, 253 aa, Artificial Sequence
  UROKINASE-TYPE PLASMINOGEN ACTIVATOR (u-PA) protease domain R37aS/V41R/L97bG/H99Q/C122S
IIGGEFTTIENQPWFAAIYRRHSGGSVTYRCGGSLISPCWVISATHCFIDYPKKEDYIVYLGRSRLNSNTQGEMKFEVENLILHKDYSADTGAQHNDIALLKIRSKEGRCAQPSRTIQTISLPSMYNDPQFGTSCEITGFGKENSTDYLYPEQLKMTVVKLISHRECQQPHYYGSEVTTKMLCAADPQWKTDSCQGDSGGPLVCSLQGRMTLTGIVSWGRGCALKDKPGVYTRVSHFLPWIRSHTKEENGLAL

SEQ ID NO: 42 - protein, 253 aa, Artificial Sequence
  UROKINASE-TYPE PLASMINOGEN ACTIVATOR (u-PA) protease domain T39Y/V41R/L97bA/H99Q/C122S
IIGGEFTTIENQPWFAAIYRRHRGGSVYYRCGGSLISPCWVISATHCFIDYPKKEDYIVYLGRSRLNSNTQGEMKFEVENLILHKDYSADTAAQHNDIALLKIRSKEGRCAQPSRTIQTISLPSMYNDPQFGTSCEITGFGKENSTDYLYPEQLKMTVVKLISHRECQQPHYYGSEVTTKMLCAADPQWKTDSCQGDSGGPLVCSLQGRMTLTGIVSWGRGCALKDKPGVYTRVSHFLPWIRSHTKEENGLAL

SEQ ID NO: 43 - protein, 253 aa, Artificial Sequence
  UROKINASE-TYPE PLASMINOGEN ACTIVATOR (u-PA) protease domain T39Y/V41R/Y60bQ/L97bA/H99Q/C122S
IIGGEFTTIENQPWFAAIYRRHRGGSVYYRCGGSLISPCWVISATHCFIDQPKKEDYIVYLGRSRLNSNTQGEMKFEVENLILHKDYSADTAAQHNDIALLKIRSKEGRCAQPSRTIQTISLPSMYNDPQFGTSCEITGFGKENSTDYLYPEQLKMTVVKLISHRECQQPHYYGSEVTTKMLCAADPQWKTDSCQGDSGGPLVCSLQGRMTLTGIVSWGRGCALKDKPGVYTRVSHFLPWIRSHTKEENGLAL

SEQ ID NO: 44 - protein, 253 aa, Artificial Sequence
  UROKINASE-TYPE PLASMINOGEN ACTIVATOR (u-PA) protease domain T39Y/V41R/D60aP/L97bA/H99Q/C122S
IIGGEFTTIENQPWFAAIYRRHRGGSVYYRCGGSLISPCWVISATHCFIPYPKKEDYIVYLGRSRLNSNTQGEMKFEVENLILHKDYSADTAAQHNDIALLKIRSKEGRCAQPSRTIQTISLPSMYNDPQFGTSCEITGFGKENSTDYLYPEQLKMTVVKLISHRECQQPHYYGSEVTTKMLCAADPQWKTDSCQGDSGGPLVCSLQGRMTLTGIVSWGRGCALKDKPGVYTRVSHFLPWIRSHTKEENGLAL

SEQ ID NO: 45 - protein, 330 aa, Artificial Sequence [sequence omitted]

SEQ ID NO: 46 - DNA, 5132 bp, Homo sapiens
agataaaaagccagctccagcaggcgctgctcactcctccccatcctctccctctgtccctctgtccctctgaccctgcactgtcccagcaccatgggacccacctcaggtcccagcctgctgctcctgctactaacccacctccccctggctctggggagtcccatgtactctatcatcacccccaacatcttgcggctggagagcgaggagaccatggtgctggaggcccacgacgcgcaaggggatgttccagtcactgttactgtccacgacttcccaggcaaaaaactagtgctgtccagtgagaagactgtgctgacccctgccaccaaccacatgggcaacgtcaccttcacgatcccagccaacagggagttcaagtcagaaaaggggcgcaacaagttcgtgaccgtgcaggccaccttcgggacccaagtggtggagaaggtggtgctggtcagcctgcagagcgggtacctcttcatccagacagacaagaccatctacacccctggctccacagttctctatcggatcttcaccgtcaaccacaagctgctacccgtgggccggacggtcatggtcaacattgagaacccggaaggcatcccggtcaagcaggactccttgtcttctcagaaccagcttggcgtcttgcccttgtcttgggacattccggaactcgtcaacatgggccagtggaagatccgagcctactatgaaaactcaccacagcaggtcttctccactgagtttgaggtgaaggagtacgtgctgcccagtttcgaggtcatagtggagcctacagagaaattctactacatctataacgagaagggcctggaggtcaccatcaccgccaggttcctctacgggaagaaagtggagggaactgcctttgtcatcttcgggatccaggatggcgaacagaggatttccctgcctgaatccctcaagcgcattccgattgaggatggctcgggggaggttgtgctgagccggaaggtactgctggacggggtgcagaacccccgagcagaagacctggtggggaagtctttgtacgtgtctgccaccgtcatcttgcactcaggcagtgacatggtgcaggcagagcgcagcgggatccccatcgtgacctctccctaccagatccacttcaccaagacacccaagtacttcaaaccaggaatgccctttgacctcatggtgttcgtgacgaaccctgatggctctccagcctaccgagtccccgtggcagtccagggcgaggacactgtgcagtctctaacccagggagatggcgtggccaaactcagcatcaacacacaccccagccagaagcccttgagcatcacggtgcgcacgaagaagcaggagctctcggaggcagagcaggctaccaggaccatgcaggctctgccctacagcaccgtgggcaactccaacaattacctgcatctctcagtgctacgtacagagctcagacccggggagaccctcaacgtcaacttcctcctgcgaatggaccgcgcccacgaggccaagatccgctactacacctacctgatcatgaacaagggcaggctgttgaaggcgggacgccaggtgcgagagcccggccaggacctggtggtgctgcccctgtccatcaccaccgacttcatcccttccttccgcctggtggcgtactacacgctgatcggtgccagcggccagagggaggtggtggccgactccgtgtgggtggacgtcaaggactcctgcgtgggctcgctggtggtaaaaagcggccagtcagaagaccggcagcctgtacctgggcagcagatgaccctgaagatagagggtgaccacggggcccgggtggtactggtggccgtggacaagggcgtgttcgtgctgaataagaagaacaaactgacgcagagtaagatctgggacgtggtggagaaggcagacatcggctgcaccccgggcagtgggaaggattacgccggtgtcttctccgacgcagggctgaccttcacgagcagcagtggccagcagaccgcccagagggcagaacttcagtgcccgcagccagccgcccgccgacgccgttccgtgcagctcacggagaagcgaatggacaaagtcggcaagtaccccaaggagctgcgcaagtgctgcgaggacggcatgcgggagaaccccatgaggttctcgtgccagcgccggacccgtttcatctccctgggcgaggcgtgcaagaaggtcttcctggactgctgcaactacatcacagagctgcggcggcagcacgcgcgggccagccacctgggcctggccaggagtaacctggatgaggacatcattgcagaagagaacatcgtttcccgaagtgagttcccagagagctggctgtggaacgttgaggacttgaaagagccaccgaaaaatggaatctctacgaagctcatgaatatatttttgaaagactccatcaccacgtgggagattctggctgtgagcatgtcggacaagaaagggatctgtgtggcagaccccttcgaggtcacagtaatgcaggacttcttcatcgacctgcggctaccctactctgttgttcgaaacgagcaggtggaaatccgagccgttctctacaattaccggcagaaccaagagctcaaggtgagggtggaactactccacaatccagccttctgcagcctggccaccaccaagaggcgtcaccagcagaccgtaaccatcccccccaagtcctcgttgtccgttccatatgtcatcgtgccgctaaagaccggcctgcaggaagtggaagtcaaggctgctgtctaccatcatttcatcagtgacggtgtcaggaagtccctgaaggtcgtgccggaaggaatcagaatgaacaaaactgtggctgttcgcaccctggatccagaacgcctgggccgtgaaggagtgcagaaagaggacatcccacctgcagacctcagtgaccaagtcccggacaccgagtctgagaccagaattctcctgcaagggaccccagtggcccagatgacagaggatgccgtcgacgcggaacggctgaagcacctcattgtgaccccctcgggctgcggggaacagaacatgatcggcatgacgcccacggtcatcgctgtgcattacctggatgaaacggagcagtgggagaagttcggcctagagaagcggcagggggccttggagctcatcaagaaggggtacacccagcagctggccttcagacaacccagctctgcctttgcggccttcgtgaaacgggcacccagcacctggctgaccgcctacgtggtcaaggtcttctctctggctgtcaacctcatcgccatcgactcccaagtcctctgcggggctgttaaatggctgatcctggagaagcagaagcccgacggggtcttccaggaggatgcgcccgtgatacaccaagaaatgattggtggattacggaacaacaacgagaaagacatggccctcacggcctttgttctcatctcgctgcaggaggctaaagatatttgcgaggagcaggtcaacagcctgccaggcagcatcactaaagcaggagacttccttgaagccaactacatgaacctacagagatcctacactgtggccattgctggctatgctctggcccagatgggcaggctgaaggggcctcttcttaacaaatttctgaccacagccaaagataagaaccgctgggaggaccctggtaagcagctctacaacgtggaggccacatcctatgccctcttggccctactgcagctaaaagactttgactttgtgcctcccgtcgtgcgttggctcaatgaacagagatactacggtggtggctatggctctacccaggccaccttcatggtgttccaagccttggctcaataccaaaaggacgcccctgaccaccaggaactgaaccttgatgtgtccctccaactgcccagccgcagctccaagatcacccaccgtatccactgggaatctgccagcctcctgcgatcagaagagaccaaggaaaatgagggtttcacagtcacagctgaaggaaaaggccaaggcaccttgtcggtggtgacaatgtaccatgctaaggccaaagatcaactcacctgtaataaattcgacctcaaggtcaccataaaaccagcaccggaaacagaaaagaggcctcaggatgccaagaacactatgatccttgagatctgtaccaggtaccggggagaccaggatgccactatgtctatattggacatatccatgatgactggctttgctccagacacagatgacctgaagcagctggccaatggtgttgacagatacatctccaagtatgagctggacaaagccttctccgataggaacaccctcatcatctacctggacaaggtctcacactctgaggatgactgtctagctttcaaagttcaccaatactttaatgtagagcttatccagcctggagcagtcaaggtctacgcctattacaacctggaggaaagctgtacccggttctaccatccggaaaaggaggatggaaagctgaacaagctctgccgtgatgaactgtgccgctgtgctgaggagaattgcttcatacaaaagtcggatgacaaggtcaccctggaagaacggctggacaaggcctgtgagccaggagtggactatgtgtacaagacccgactggtcaaggttcagctgtccaatgactttgacgagtacatcatggccattgagcagaccatcaagtcaggctcggatgaggtgcaggttggacagcagcgcacgttcatcagccccatcaagtgcagagaagccctgaagctggaggagaagaaacactacctcatgtggggtctctcctccgatttctggggagagaagcccaacctcagctacatcatcgggaaggacacttgggtggagcactggcccgaggaggacgaatgccaagacgaagagaaccagaaacaatgccaggacctcggcgccttcaccgagagcatggttgtctttgggtgccccaactgaccacacccccattcccccactccagataaagcttcagttatatctca

SEQ ID NO: 47 - protein, 1663 aa, Homo sapiens
  Complement Protein C3
MGPTSGPSLLLLLLTHLPLALGSPMYSIITPNILRLESEETMVLEAHDAQGDVPVTVTVHDFPGKKLVLSSEKTVLTPATNHMGNVTFTIPANREFKSEKGRNKFVTVQATFGTQVVEKVVLVSLQSGYLFIQTDKTIYTPGSTVLYRIFTVNHKLLPVGRTVMVNIENPEGIPVKQDSLSSQNQLGVLPLSWDIPELVNMGQWKIRAYYENSPQQVFSTEFEVKEYVLPSFEVIVEPTEKFYYIYNEKGLEVTITARFLYGKKVEGTAFVIFGIQDGEQRISLPESLKRIPIEDGSGEVVLSRKVLLDGVQNPRAEDLVGKSLYVSATVILHSGSDMVQAERSGIPIVTSPYQIHFTKTPKYFKPGMPFDLMVFVTNPDGSPAYRVPVAVQGEDTVQSLTQGDGVAKLSINTHPSQKPLSITVRTKKQELSEAEQATRTMQALPYSTVGNSNNYLHLSVLRTELRPGETLNVNFLLRMDRAHEAKIRYYTYLIMNKGRLLKAGRQVREPGQDLVVLPLSITTDFIPSFRLVAYYTLIGASGQREVVADSVWVDVKDSCVGSLVVKSGQSEDRQPVPGQQMTLKIEGDHGARVVLVAVDKGVFVLNKKNKLTQSKIWDVVEKADIGCTPGSGKDYAGVFSDAGLTFTSSSGQQTAQRAELQCPQPAARRRRSVQLTEKRMDKVGKYPKELRKCCEDGMRENPMRFSCQRRTRFISLGEACKKVFLDCCNYITELRRQHARASHLGLARSNLDEDIIAEENIVSRSEFPESWLWNVEDLKEPPKNGISTKLMNIFLKDSITTWEILAVSMSDKKGICVADPFEVTVMQDFFIDLRLPYSVVRNEQVEIRAVLYNYRQNQELKVRVELLHNPAFCSLATTKRRHQQTVTIPPKSSLSVPYVIVPLKTGLQEVEVKAAVYHHFISDGVRKSLKVVPEGIRMNKTVAVRTLDPERLGREGVQKEDIPPADLSDQVPDTESETRILLQGTPVAQMTEDAVDAERLKHLIVTPSGCGEQNMIGMTPTVIAVHYLDETEQWEKFGLEKRQGALELIKKGYTQQLAFRQPSSAFAAFVKRAPSTWLTAYVVKVFSLAVNLIAIDSQVLCGAVKWLILEKQKPDGVFQEDAPVIHQEMIGGLRNNNEKDMALTAFVLISLQEAKDICEEQVNSLPGSITKAGDFLEANYMNLQRSYTVAIAGYALAQMGRLKGPLLNKFLTTAKDKNRWEDPGKQLYNVEATSYALLALLQLKDFDFVPPVVRWLNEQRYYGGGYGSTQATFMVFQALAQYQKDAPDHQELNLDVSLQLPSRSSKITHRIHWESASLLRSEETKENEGFTVTAEGKGQGTLSVVTMYHAKAKDQLTCNKFDLKVTIKPAPETEKRPQDAKNTMILEICTRYRGDQDATMSILDISMMTGFAPDTDDLKQLANGVDRYISKYELDKAFSDRNTLIIYLDKVSHSEDDCLAFKVHQYFNVELIQPGAVKVYAYYNLEESCTRFYHPEKEDGKLNKLCRDELCRCAEENCFIQKSDDKVTLEERLDKACEPGVDYVYKTRLVKVQLSNDFDEYIMAIEQTIKSGSDEVQVGQQRTFISPIKCREALKLEEKKHYLMWGLSSDFWGEKPNLSYIIGKDTWVEHWPEEDECQDEENQKQCQDLGAFTESMVVFGCPN

SEQ ID NO: 48 - protein, 157 aa, Artificial Sequence
  uPA a chain long
SNELHQVPSNCDCLNGGTCVSNKYFSNIHWCNCPKKFGGQHCEIDKSKTCYEGNGHFYRGKASTDTMGRPCLPWNSATVLQQTYHAHRSDALQLGLGKHNYCRNPDNRRRPWCYVQVGLKPLVQECMVHDCADGKKPSSPPEELKFQCGQKTLRPRF

SEQ ID NO: 49 - protein, 22 aa, Artificial Sequence
  uPA a chain short
KPSSPPEELKFQCGQKTLRPRF

SEQ ID NO: 50 - protein, 231 aa, Artificial Sequence
  hIgG1 Fc
PKSCDKTHTCPPCPAPELLGGPSVFLFPPKPKDTLMISRTPEVTCVVVDVSHEDPEVKFNWYVDGVEVHNAKTKPREEQYNSTYRVVSVLTVLHQDWLNGKEYKCKVSNKALPAPIEKTISKAKGQPREPQVYTLPPSREEMTKNQVSLTCLVKGFYPSDIAVEWESNGQPENNYKTTPPVLDSDGSFFLYSKLTVDKSRWQQGNVFSCSVMHEALHNHYTQKSLSLSPGK

SEQ ID NO: 51 - protein, 414 aa, Artificial Sequence
  u-PA isoform 2
MVFHLRTRYEQANCDCLNGGTCVSNKYFSNIHWCNCPKKFGGQHCEIDKSKTCYEGNGHFYRGKASTDTMGRPCLPWNSATVLQQTYHAHRSDALQLGLGKHNYCRNPDNRRRPWCYVQVGLKPLVQECMVHDCADGKKPSSPPEELKFQCGQKTLRPRFKIIGGEFTTIENQPWFAAIYRRHRGGSVTYVCGGSLISPCWVISATHCFIDYPKKEDYIVYLGRSRLNSNTQGEMKFEVENLILHKDYSADTLAHHNDIALLKIRSKEGRCAQPSRTIQTICLPSMYNDPQFGTSCEITGFGKENSTDYLYPEQLKMTVVKLISHRECQQPHYYGSEVTTKMLCAADPQWKTDSCQGDSGGPLVCSLQGRMTLTGIVSWGRGCALKDKPGVYTRVSHFLPWIRSHTKEENGLAL

SEQ ID NO: 52 - protein, 433 aa, Mus musculus
  u-PA precursor
MKVWLASLFLCALVVKNSEGGSVLGAPDESNCGCQNGGVCVSYKYFSRIRRCSCPRKFQGEHCEIDASKTCYHGNGDSYRGKANTDTKGRPCLAWNAPAVLQKPYNAHRPDAISLGLGKHNYCRNPDNQKRPWCYVQIGLRQFVQECMVHDCSLSKKPSSSVDQQGFQCGQKALRPRFKIVGGEFTEVENQPWFAAIYQKNKGGSPPSFKCGGSLISPCWVASAAHCFIQLPKKENYVVYLGQSKESSYNPGEMKFEVEQLILHEYYREDSLAYHNDIALLKIRTSTGQCAQPSRSIQTICLPPRFTDAPFGSDCEITGFGKESESDYLYPKNLKMSVVKLVSHEQCMQPHYYGSEINYKMLCAADPEWKTDSCKGDSGGPLICNIEGRPTLSGIVSWGRGCAEKNKPGVYTRVSHFLDWIQSHIGEEKGLAF

SEQ ID NO: 53 - protein, 432 aa, Rattus norvegicus
  u-PA precursor
MRVWLASLFLCALVANSEGGSELEASDESNCGCQNGGVCVSYKYFSSIRRCSCPKKFKGEHCEIDTSKTCYHGNGQSYRGKANTDTKGRPCLAWNSPAVLQQTYNAHRSDALSLGLGKHNYCRNPDNQRRPWCYVQIGLKQFVQECMVQDCSLSKKPSSTVDQQGFQCGQKALRPRFKIVGGEFTVVENQPWFAAIYLKNKGGSPPSFKCGGSLISPCWVASATHCFVNQPKKEEYVVYLGQSKRNSYNPGEMKFEVEQLILHEDFSDETLAFHNDIALLKIRTSTGQCAQPSRTIQTICLPPRFGDAPFGSDCEITGFGQESATDYFYPKDLKMSVVKIISHEQCKQPHYYGSEINYKMLCAADPEWKTDSCSGDSGGPLICNIDGRPTLSGIVSWGSGCAEKNKPGVYTRVSYFLNWIQSHIGEENGLAF

SEQ ID NO: 54 - protein, 433 aa, Bos taurus
  u-PA precursor
MRVLLACLLVCALVVSDSDGSNEVHKESGESNCGCLNGGKCVTYKYFSNIQRCSCPKKFQGEHCEIDTSKTCYQGNGHSYRGKANRDLSGRPCLAWDSPTVLLKMYHAHRSDAIQLGLGKHNYCRNPDNQRRPWCYVQIGLKQFVQFCMVQDCSVGKSPSSPREKEEFQCGQKALRPRFKIVGGQVTNAENQPWFAAIYRRHRGGSITYLCGGSLISPCWVVSATHCFIDHPKKENYIVYLGQSRLNSDTRGEMQFEVEKLILHEDYSAESLAHHNDIALLKIRTSRGQCAQPSRSIQTICLPPEHEDAHSRTRCEITGFGKENPSDYRYSDELKMTFVSLVSHEVCQQPHYYGAEVTDKMLCAADPQWETDSCQGDSGGPLVCTIQGRLTLTGIVSWGRDCAMKYKPGVYTRVSKFLPWINTHTRGEINLVL

SEQ ID NO: 55 - protein, 442 aa, Sus scrofa
  u-PA precursor
MRVLRACLSLCVLVVSDSKGSHELHQESGASNCGCLNGGKCVSYKYFSNIQRCSCPKKFQGEHCEIDTSQTCFEGNGHSYRGKANTNTGGRPCLPWNSATVLLNTYHAHRPDALQLGLGKHNYCRNPDNQRRPWCYVQVGLKQLVQECMVPNCSGGESHRPAYDGKNPFSTPEKVEFQCGQKALRPRFKIVGGKSTTIENQPWFAAIYRRHRGGSVTYVCGGSLISPCWVVSATHCFINYQQKEDYIVYLGRQTLHSSTHGEMKFEVEKLILHEDYSADSLAHHNDIALLKIRTDKGQCAQPSRSIQTICLPPVNGDAHFGASCEIVGFGKEDPSDYLYPEQLKMTVVKLVSHRECQQPHYYGSEVTTKMLCAADPQWKTDSCQGDSGGPLVCSTQGRLTLTGIVSWGRECAMKDKPGVYTRVSRFLTWIHTHVGGENGLAH

SEQ ID NO: 56 - protein, 433 aa, Oryctolagus cuniculus
  u-PA precursor
MRVLLVCLLLCALVVSDSEGSHELHGVSDASNCGCLNGGTCVTYKYFSNIWRCNCPKKFQGEHCEIDTLKTCYHGDGHSYRGKANTDIMDRPCLAWNSANVLTKTYHAHRPDALQLGLGKHNYCRNPDHQRRPWCYVQVGLKQLIQECKVHDCSSGKKPALPPGKLEFQCGQKALRPRFKIIGGEFTIIENQPWFAAIYRRHRGGSVTYVCGGSLISPCWVVSATHCFINHQKKEDYIVYLGRSRLNSMTPGEMKFEVEQLILHEGYRADTLAHHNDIALLKILSNNGQCAQPSRSIQTICLPPWNADPNFGTSCEITGFGKENSTDYLYPEQLKMTVVKLVSYQECQQPHYYGSEVTTKMLCAADPQWETDSCQGDSGGPLVCSVQGRMTLTGIVSWGRGCALKNKPGVYTRVSRFLPWIRSHIGEENGLAL

SEQ ID NO: 57 - protein, 434 aa, Gallus gallus
  u-PA precursor
MKLIIFLTVTLCTLVTGLDSVYIRQYYKLSHKHRPQHRECQCLNGGTCITYRFFSQIKRCLCPEGYGGLHCEIDTNSICYSGNGEDYRGMAEDPGCLYWDHPSVIRWGDYHADLKNALQLGLGKHNYCRNPNGRSRPWCYTKRRYSIQETPCSTIEKCERTCGQRSFSKYFKIVGGSQAEVETQPWIAGIFQNIMGTDQFLCGGSLIDPCWVLTAAHCFYNPTKKQPNKSVYKVFLGKSILNTNDEHEQVFMVDEIISHPDFTDHTGGNDNDIALIRIRTASGQCAVESNYVRTVCLPEKNLNLYDNTWCEIAGYGKQNSYDIYYAQRLMSATVNLISQDDCKNKYYDSTRVTDNMVCAGDPLWETDACKGDSGGPMVCEHNGRMTLYGIVSWGDGCAKKNKPGVYTRVTRYLNWIDSNMNAVFTKSRSFREPK

SEQ ID NO: 58 - protein, 433 aa, Papio cynocephalus
  u-PA precursor
MRALLAHLLLCVLVVSASKGSRELQVPSDCGCLNGGTCMSNKYFSSIHWCNCPKKFGGQHCEIDKSKTCYEGNGHFYRGKASTDTMGRSCLAWNSATVLQQTYHAHRSDALQLGLGKHNYCRNPDNRRRPWCYVQVGLKQRVQECMVHNCADGKKPSSPPEELQFQCGQRTLRPRFKIVGGEFTTIENQPWFAAIYRRHRGGSVTYVCGGSLISPCWVVSATHCFINYPKKEDYIVYLGRSRLNSNTQGEMKFEVENLILHEDYSADTLAHHNDIALLKIRSKEGRCAQPSRTIQTICLPSMYNDPNDPPFGTSCEITGFGKENSTDYLYPEQLKMTVVKLVSHQKCQQPHYYGSEVTTKMLCAADPQWETDSCQGDSGGPLVCSIQGHMTLTGIVSWGRGCALKDKPGVYTRVSRFLPWIHSHTREQNGLAL

SEQ ID NO: 59 - protein, 431 aa, Pongo abelii
  u-PA precursor
MRALLARLLLCVLVVSDSKGSNELHQVPSNCDCLNGGTCVSNKYFSNIHWCNCPKKFGGQHCEIDKSKTCYEGNGHFYRGKASTDTMGRPCLAWNSATVLQQTYHAHRSDALQLGLGKHNYCRNPDNRWRPWCYVQVGLKPLVQECMVHDCADGKKPSSPPEELKFQCGQKTLRPRFKIVGGEFTTIENQPWFAAIYRRHRGGSVTYVCGGSLISPCWVVSATHCFIDYPKKEDYIVYLGRSRLNSHTQGEMKFEVENLILHKDYSADTLAHHNDIALLKIHSKEGRCAQPSRTIQTICLPSMYNDPPFGTSCEITGFGKENSTDYLYPEQLKMTVVKLISHRECQQPHYYGSEVTTKMLCAADPQWKTDSCQGDSGGPLVCSLQGRMTLTGIVSWGRGCALKDKPGVYTRVSYFLPWIRSHTKEENGLAL

SEQ ID NO: 60 - protein, 428 aa, Canus lupus
  u-PA precursor
MRALMTCLLLGALVGSHEFHPVSSASNCSCLNGGTCVSYKYFSNIQRCNCPKKFQGEHCEIDTSKTCYEGNGHSYRGKANTNTRGRPCLAWNSAAVLLKQYHALRPDALQLGLGKHNYCRNPDHQRKPWCYVQVGLMQLVQECTVQHCSFEKNPHSPPEKAEFQCGQKALRPRFKIIGGEFTTIENQPWFAAIYRKHRGGSVTYQCGGSLISPCWVVSATHCFINSQKKDDYIVYLGRSKRISKTFGEMKFEVEKLILHEDYSADSLAHHNDIALLKIRSDEGQCAQPSRSIQTICLPPSRGDAHFGASCEISGFGKENSTDYLYPEQLKMTVVKLVSHQECQQPHYYGSEVTDQMLCAADPEWETDSCQGDSGGPLVCSTQGRLTLTGIVSWGSGCAMKNKPGVYTRVSRFLPWIHRHIGEQNGLTL

SEQ ID NO: 61 - protein, 433 aa, Ovis aries
  u-PA precursor
MRVLLACLLVCALVVSDSDGSNEVHKESGVSDCGCLNGGKCVSYKYFSNIQRCSCPKKFQGEYCEIDTSKTCYQGNGHSYRGKANTDLRGRPRLAWDSATVLLKMYHAHRSDAIQLGLGKHNYCRNPDNQRRPWCYVQVGLKQFVQECMVQDCPAGKGPSSPKEKVEFQCGQKALRPRFEIVGGEFTTIESQPWFAAIYRRHRGGSVTYLCGGSLISPCWVVSATHCFTNHPKKEDYIVYLGRSKLNSDTLGEMKFEVEKLILHEDYSADSLAHHNDIALLKIRTSRGQCAQPSRSIQTICLPPLYGDARFGTRCEITGFGKENPSDYLYPEQLKMTFVNLVSHEECQQPHYYGTEVTDKMLCAADPQWETDSCQGDSGGPLVCTIQGRLTLTGIVSWGRECAMKDKPGVYTRVSKFLPWIYTHTRGEIDLGL

SEQ ID NO: 62 - protein, 430 aa, Callithrix jacchus
  u-PA
MRTLLVRLLLCVLIVSDSKGRREHQVPSNCDCLNGGTCVSSKYFSNTRWCNCPKKFGGLHCEIDNSKTCYEGNGHFYRGKAKTDIMGRSCLSWNSAAVLQQTYHAHRSDALQLGLGKHNYCRNPDNRRRPWCYVQVGLKQLVQECTVHNCADGKKPSSPPAELEFQCGQKPLTPRFKIIGGEYTTIENQPWFAAIYRQHRGGSVTYLCGGSLISPCWVVSATHCFINHAVKEDFIVYLGRSRLNSNTPGEMRFDVENLILHEGYSADTLAHHNDIALLKIRSKEGKCAQPSRTIQTICLPPMLNDARFGTSCEITGFGKENTTDYFYPEQLKMTVVKLVSHQECQQPNYYGSEVTTKMLCAADPQWETDSCQGDSGGPLICSIQGHMTLTGIVSWGRGCALKDKPGVYTRVSRFLPWIRRHTKEENGPAV

SEQ ID NO: 63 - protein, 430 aa, Macaca mulatta
  u-PA
MRALLAHLLLCVLVVSDSKGSRELQVPSDCGCLNGGTCMSNKYFSSIHWCNCPKKFGGQHCEIDKSKTCYEGNGHFYRGKASTDTMGRSCLAWNSATVLQQTYHAHRSDALQLGLGKHNYCRNPDNRRRPWCYVQVGLKQLVQECMVQNCADGKKPSSPPEELQFQCGQRTLRPRFKIVGGEFTTIENQPWFAAIYRRHRGGSVTYVCGGSLISPCWVVSATHCFINYPKKEDYIVYLGRSRLNSNTQGEMKFEVENLILHEDYSADTLAHHNDIALLKIRSKEGRCAQPSRTIQTICLPSTYNDPPFGTSCEITGFGKENSTDYLYPERLKMTVVKLVSHQKCQQPHYYGSEVTTKMLCAADPQWETDSCQGDSGGPLVCSIQGHMTLTGIVSWGRGCALKDKPGVYTRVSRFLPWIHSHTREENGLAL

SEQ ID NO: 64 - protein, 345 aa, Nomascus leucogenys
  u-PA
MGRPCLAWNSATVLQQTYHAHRSDALQLGLGKHNYCRNPDNRRRPWCYVQVGLKPLVQECMVHDCTDGKKPSSPPEELQFQCGQKTLRPRFKIIGGEFTTIENQPWFAAIYRRHRGGSVTYVCGGSLISPCWVVSATHCFIDYPKKEDYIIYLGRSRLNSNTQGEMKFEVENLILHEDYSADTLAHHNDIALLKIRSKEGRCAQPSRTIQTICLPSMYNDPHFGTSCEITGFGKENSTDYLYPEQLKMTVVKLISHKECQQPHYYGSEVTTKMLCAADPQWKTDSCQGDSGGPLVCSIRGRMTLTGIVSWGRGCALKDKPGVYTRVSHFLPWIRSHTKEENGLAL

SEQ ID NO: 65 - protein, 431 aa, Pan troglodytes
  u-PA
MRAREARLLLCVLVVSDSKGSNELHQVPSNCDCLNGGTCVSNKYFSNIHWCNCPKKFGGQHCEIDKSKTCYEGNGHFYRGKASTDTMGRPCLAWNSATVLQQTYHAHRSDALQLGLGKHNYCRNPDNRRRPWCYVQVGLKPLVQECMVHDCADGKKPSSPPEELKFQCGQKTLRPRFKIIGGEFTTIENQPWFAAIYRRHRGGSVTYLCGGSLISPCWVISATHCFIDYPKKEDYIVYLGRSRLNSNTQGEMKFEVENLILHKDYSADTLAHHNDIALLKIRSKEGRCAQPSRTIQTICLPSMYNDPQFGTSCEITGFGKENSTDYLYPEQLKMTVVKLISHRECQQPHYYGSEVTTKMLCAADPQWKTDSCQGDSGGPLVCSLQGRMTLTGIVSWGRGCALKDKPGVYTRVSHFLPWIRSHTKEENGLAL

SEQ ID NO: 66 - protein, 413 aa, Mus musculus
  u-PA mature protein
GSVLGAPDESNCGCQNGGVCVSYKYFSRIRRCSCPRKFQGEHCEIDASKTCYHGNGDSYRGKANTDTKGRPCLAWNAPAVLQKPYNAHRPDAISLGLGKHNYCRNPDNQKRPWCYVQIGLRQFVQECMVHDCSLSKKPSSSVDQQGFQCGQKALRPRFKIVGGEFTEVENQPWFAAIYQKNKGGSPPSFKCGGSLISPCWVASAAHCFIQLPKKENYVVYLGQSKESSYNPGEMKFEVEQLILHEYYREDSLAYHNDIALLKIRTSTGQCAQPSRSIQTICLPPRFTDAPFGSDCEITGFGKESESDYLYPKNLKMSVVKLVSHEQCMQPHYYGSEINYKMLCAADPEWKTDSCKGDSGGPLICNIEGRPTLSGIVSWGRGCAEKNKPGVYTRVSHFLDWIQSHIGEEKGLAF

SEQ ID NO: 67 - protein, 413 aa, Rattus norvegicus
  u-PA mature protein
GSELEASDESNCGCQNGGVCVSYKYFSSIRRCSCPKKFKGEHCEIDTSKTCYHGNGQSYRGKANTDTKGRPCLAWNSPAVLQQTYNAHRSDALSLGLGKHNYCRNPDNQRRPWCYVQIGLKQFVQECMVQDCSLSKKPSSTVDQQGFQCGQKALRPRFKIVGGEFTVVENQPWFAAIYLKNKGGSPPSFKCGGSLISPCWVASATHCFVNQPKKEEYVVYLGQSKRNSYNPGEMKFEVEQLILHEDFSDETLAFHNDIALLKIRTSTGQCAQPSRTIQTICLPPRFGDAPFGSDCEITGFGQESATDYFYPKDLKMSVVKIISHEQCKQPHYYGSEINYKMLCAADPEWKTDSCSGDSGGPLICNIDGRPTLSGIVSWGSGCAEKNKPGVYTRVSYFLNWIQSHIGEENGLAF

SEQ ID NO: 68 - protein, 413 aa, Bos taurus
  u-PA mature protein
SNEVHKESGESNCGCLNGGKCVTYKYFSNIQRCSCPKKFQGEHCEIDTSKTCYQGNGHSYRGKANRDLSGRPCLAWDSPTVLLKMYHAHRSDAIQLGLGKHNYCRNPDNQRRPWCYVQIGLKQFVQFCMVQDCSVGKSPSSPREKEEFQCGQKALRPRFKIVGGQVTNAENQPWFAAIYRRHRGGSITYLCGGSLISPCWVVSATHCFIDHPKKENYIVYLGQSRLNSDTRGEMQFEVEKLILHEDYSAESLAHHNDIALLKIRTSRGQCAQPSRSIQTICLPPEHEDAHSRTRCEITGFGKENPSDYRYSDELKMTFVSLVSHEVCQQPHYYGAEVTDKMLCAADPQWETDSCQGDSGGPLVCTIQGRLTLTGIVSWGRDCAMKYKPGVYTRVSKFLPWINTHTRGEINLVL

SEQ ID NO: 69 - protein, 422 aa, Sus scrofa
  u-PA mature protein
SHELHQESGASNCGCLNGGKCVSYKYFSNIQRCSCPKKFQGEHCEIDTSQTCFEGNGHSYRGKANTNTGGRPCLPWNSATVLLNTYHAHRPDALQLGLGKHNYCRNPDNQRRPWCYVQVGLKQLVQECMVPNCSGGESHRPAYDGKNPFSTPEKVEFQCGQKALRPRFKIVGGKSTTIENQPWFAAIYRRHRGGSVTYVCGGSLISPCWVVSATHCFINYQQKEDYIVYLGRQTLHSSTHGEMKFEVEKLILHEDYSADSLAHHNDIALLKIRTDKGQCAQPSRSIQTICLPPVNGDAHFGASCEIVGFGKEDPSDYLYPEQLKMTVVKLVSHRECQQPHYYGSEVTTKMLCAADPQWKTDSCQGDSGGPLVCSTQGRLTLTGIVSWGRECAMKDKPGVYTRVSRFLTWIHTHVGGENGLAH

SEQ ID NO: 70 - protein, 417 aa, Oryctolagus cuniculus
  u-PA mature protein
DSEGSHELHGVSDASNCGCLNGGTCVTYKYFSNIWRCNCPKKFQGEHCEIDTLKTCYHGDGHSYRGKANTDIMDRPCLAWNSANVLTKTYHAHRPDALQLGLGKHNYCRNPDHQRRPWCYVQVGLKQLIQECKVHDCSSGKKPALPPGKLEFQCGQKALRPRFKIIGGEFTIIENQPWFAAIYRRHRGGSVTYVCGGSLISPCWVVSATHCFINHQKKEDYIVYLGRSRLNSMTPGEMKFEVEQLILHEGYRADTLAHHNDIALLKILSNNGQCAQPSRSIQTICLPPWNADPNFGTSCEITGFGKENSTDYLYPEQLKMTVVKLVSYQECQQPHYYGSEVTTKMLCAADPQWETDSCQGDSGGPLVCSVQGRMTLTGIVSWGRGCALKNKPGVYTRVSRFLPWIRSHIGEENGLAL

SEQ ID NO: 71 - protein, 414 aa, Gallus gallus
  u-PA mature protein
VYIRQYYKLSHKHRPQHRECQCLNGGTCITYRFFSQIKRCLCPEGYGGLHCEIDTNSICYSGNGEDYRGMAEDPGCLYWDHPSVIRWGDYHADLKNALQLGLGKHNYCRNPNGRSRPWCYTKRRYSIQETPCSTIEKCERTCGQRSFSKYFKIVGGSQAEVETQPWIAGIFQNIMGTDQFLCGGSLIDPCWVLTAAHCFYNPTKKQPNKSVYKVFLGKSILNTNDEHEQVFMVDEIISHPDFTDHTGGNDNDIALIRIRTASGQCAVESNYVRTVCLPEKNLNLYDNTWCEIAGYGKQNSYDIYYAQRLMSATVNLISQDDCKNKYYDSTRVTDNMVCAGDPLWETDACKGDSGGPMVCEHNGRMTLYGIVSWGDGCAKKNKPGVYTRVTRYLNWIDSNMNAVFTKSRSFREPK

SEQ ID NO: 72 - protein, 413 aa, Papio cynocephalus
  u-PA mature protein
SRELQVPSDCGCLNGGTCMSNKYFSSIHWCNCPKKFGGQHCEIDKSKTCYEGNGHFYRGKASTDTMGRSCLAWNSATVLQQTYHAHRSDALQLGLGKHNYCRNPDNRRRPWCYVQVGLKQRVQECMVHNCADGKKPSSPPEELQFQCGQRTLRPRFKIVGGEFTTIENQPWFAAIYRRHRGGSVTYVCGGSLISPCWVVSATHCFINYPKKEDYIVYLGRSRLNSNTQGEMKFEVENLILHEDYSADTLAHHNDIALLKIRSKEGRCAQPSRTIQTICLPSMYNDPNDPPFGTSCEITGFGKENSTDYLYPEQLKMTVVKLVSHQKCQQPHYYGSEVTTKMLCAADPQWETDSCQGDSGGPLVCSIQGHMTLTGIVSWGRGCALKDKPGVYTRVSRFLPWIHSHTREQNGLAL

SEQ ID NO: 73 - protein, 411 aa, Pongo abelii
  u-PA mature protein
SNELHQVPSNCDCLNGGTCVSNKYFSNIHWCNCPKKFGGQHCEIDKSKTCYEGNGHFYRGKASTDTMGRPCLAWNSATVLQQTYHAHRSDALQLGLGKHNYCRNPDNRWRPWCYVQVGLKPLVQECMVHDCADGKKPSSPPEELKFQCGQKTLRPRFKIVGGEFTTIENQPWFAAIYRRHRGGSVTYVCGGSLISPCWVVSATHCFIDYPKKEDYIVYLGRSRLNSHTQGEMKFEVENLILHKDYSADTLAHHNDIALLKIHSKEGRCAQPSRTIQTICLPSMYNDPPFGTSCEITGFGKENSTDYLYPEQLKMTVVKLISHRECQQPHYYGSEVTTKMLCAADPQWKTDSCQGDSGGPLVCSLQGRMTLTGIVSWGRGCALKDKPGVYTRVSYFLPWIRSHTKEENGLAL

SEQ ID NO: 74 - protein, 404 aa, Canis lupus
  u-PA mature protein
ASNCSCLNGGTCVSYKYFSNIQRCNCPKKFQGEHCEIDTSKTCYEGNGHSYRGKANTNTRGRPCLAWNSAAVLLKQYHALRPDALQLGLGKHNYCRNPDHQRKPWCYVQVGLMQLVQECTVQHCSFEKNPHSPPEKAEFQCGQKALRPRFKIIGGEFTTIENQPWFAAIYRKHRGGSVTYQCGGSLISPCWVVSATHCFINSQKKDDYIVYLGRSKRISKTFGEMKFEVEKLILHEDYSADSLAHHNDIALLKIRSDEGQCAQPSRSIQTICLPPSRGDAHFGASCEISGFGKENSTDYLYPEQLKMTVVKLVSHQECQQPHYYGSEVTDQMLCAADPEWETDSCQGDSGGPLVCSTQGRLTLTGIVSWGSGCAMKNKPGVYTRVSRFLPWIHRHIGEQNGLTL

SEQ ID NO: 75 - protein, 413 aa, Ovis aries
  u-PA mature protein
SNEVHKESGVSDCGCLNGGKCVSYKYFSNIQRCSCPKKFQGEYCEIDTSKTCYQGNGHSYRGKANTDLRGRPRLAWDSATVLLKMYHAHRSDAIQLGLGKHNYCRNPDNQRRPWCYVQVGLKQFVQECMVQDCPAGKGPSSPKEKVEFQCGQKALRPRFEIVGGEFTTIESQPWFAAIYRRHRGGSVTYLCGGSLISPCWVVSATHCFTNHPKKEDYIVYLGRSKLNSDTLGEMKFEVEKLILHEDYSADSLAHHNDIALLKIRTSRGQCAQPSRSIQTICLPPLYGDARFGTRCEITGFGKENPSDYLYPEQLKMTFVNLVSHEECQQPHYYGTEVTDKMLCAADPQWETDSCQGDSGGPLVCTIQGRLTLTGIVSWGRECAMKDKPGVYTRVSKFLPWIYTHTRGEIDLGL

SEQ ID NO: 76 - protein, 263 aa, Artificial Sequence
  mature chymotrypsin polypeptide
MAFLWLLSCWALLGTTFGCGVPAIHPVLSGLSRIVNGEDAVPGSWPWQVSLQDKTGFHFCGGSLISEDWVVTAAHCGVRTSDVVVAGEFDQGSDEENIQVLKIAKVFKNPKFSILTVNNDITLLKLATPARFSQTVSAVCLPSADDDFPAGTLCATTGWGKTKYNANKTPDKLQQAALPLLSNAECKKSWGRRITDVMICAGASGVSSCMGDSGGPLVCQKDGAWTLVGIVSWGSDTCSTSSPGVYARVTKLIPWVQKILAAN

SEQ ID NO: 77 - protein, 1636 aa, Artificial Sequence
  mature 2 chain C3 protein
PMYSIITPNILRLESEETMVLEAHDAQGDVPVTVTVHDFPGKKLVLSSEKTVLTPATNHMGNVTFTIPANREFKSEKGRNKFVTVQATFGTQVVEKVVLVSLQSGYLFIQTDKTIYTPGSTVLYRIFTVNHKLLPVGRTVMVNIENPEGIPVKQDSLSSQNQLGVLPLSWDIPELVNMGQWKIRAYYENSPQQVFSTEFEVKEYVLPSFEVIVEPTEKFYYIYNEKGLEVTITARFLYGKKVEGTAFVIFGIQDGEQRISLPESLKRIPIEDGSGEVVLSRKVLLDGVQNPRAEDLVGKSLYVSATVILHSGSDMVQAERSGIPIVTSPYQIHFTKTPKYFKPGMPFDLMVFVTNPDGSPAYRVPVAVQGEDTVQSLTQGDGVAKLSINTHPSQKPLSITVRTKKQELSEAEQATRTMQALPYSTVGNSNNYLHLSVLRTELRPGETLNVNFLLRMDRAHEAKIRYYTYLIMNKGRLLKAGRQVREPGQDLVVLPLSITTDFIPSFRLVAYYTLIGASGQREVVADSVWVDVKDSCVGSLVVKSGQSEDRQPVPGQQMTLKIEGDHGARVVLVAVDKGVFVLNKKNKLTQSKIWDVVEKADIGCTPGSGKDYAGVFSDAGLTFTSSSGQQTAQRAELQCPQPAASVQLTEKRMDKVGKYPKELRKCCEDGMRENPMRFSCQRRTRFISLGEACKKVFLDCCNYITELRRQHARASHLGLARSNLDEDIIAEENIVSRSEFPESWLWNVEDLKEPPKNGISTKLMNIFLKDSITTWEILAVSMSDKKGICVADPFEVTVMQDFFIDLRLPYSVVRNEQVEIRAVLYNYRQNQELKVRVELLHNPAFCSLATTKRRHQQTVTIPPKSSLSVPYVIVPLKTGLQEVEVKAAVYHHFISDGVRKSLKVVPEGIRMNKTVAVRTLDPERLGREGVQKEDIPPADLSDQVPDTESETRILLQGTPVAQMTEDAVDAERLKHLIVTPSGCGEQNMIGMTPTVIAVHYLDETEQWEKFGLEKRQGALELIKKGYTQQLAFRQPSSAFAAFVKRAPSTWLTAYVVKVFSLAVNLIAIDSQVLCGAVKWLILEKQKPDGVFQEDAPVIHQEMIGGLRNNNEKDMALTAFVLISLQEAKDICEEQVNSLPGSITKAGDFLEANYMNLQRSYTVAIAGYALAQMGRLKGPLLNKFLTTAKDKNRWEDPGKQLYNVEATSYALLALLQLKDFDFVPPVVRWLNEQRYYGGGYGSTQATFMVFQALAQYQKDAPDHQELNLDVSLQLPSRSSKITHRIHWESASLLRSEETKENEGFTVTAEGKGQGTLSVVTMYHAKAKDQLTCNKFDLKVTIKPAPETEKRPQDAKNTMILEICTRYRGDQDATMSILDISMMTGFAPDTDDLKQLANGVDRYISKYELDKAFSDRNTLIIYLDKVSHSEDDCLAFKVHQYFNVELIQPGAVKVYAYYNLEESCTRFYHPEKEDGKLNKLCRDELCRCAEENCFIQKSDDKVTLEERLDKACEPGVDYVYKTRLVKVQLSNDFDEYIMAIEQTIKSGSDEVQVGQQRTFISPIKCREALKLEEKKHYLMWGLSSDFWGEKPNLSYIIGKDTWVEHWPEEDECQDEENQKQCQDLGAFTESMVVFGCPN

SEQ ID NO: 78 - protein, 4 aa, Artificial Sequence
  C3 convertase cleavage site 748-749
GLAR

SEQ ID NO: 79 - protein, 4 aa, Artificial Sequence
  Factor I cleavage site 954-955
RLGR

SEQ ID NO: 80 - protein, 4 aa, Artificial Sequence
  Factor I cleavage site 1303-1304
LPSR

SEQ ID NO: 81 - protein, 4 aa, Artificial Sequence
  Factor I cleavage site 1320-1321
SLLR

SEQ ID NO: 82 - protein, 21 aa, Artificial Sequence
  Buforin II
TRSSRAGLQFPVGRVHRLLRK

SEQ ID NO: 83 - protein, 16 aa, Artificial Sequence
  DPV3
RKKRRRESRKKRRRES

SEQ ID NO: 84 - protein, 17 aa, Artificial Sequence
  DPV6
GRPRESGKKRKRKRLKP

SEQ ID NO: 85 - protein, 15 aa, Artificial Sequence
  DPV7
GKRKKKGKLGKKRDP

SEQ ID NO: 86 - protein, 17 aa, Artificial Sequence
  DPV7b
GKRKKKGKLGKKRPRSR

SEQ ID NO: 87 - protein, 18 aa, Artificial Sequence
  DPV3/10
RKKRRRESRRARRSPRHL

SEQ ID NO: 88 - protein, 19 aa, Artificial Sequence
  DPV10/6
SRRARRSPRESGKKRKRKR

SEQ ID NO: 89 - protein, 19 aa, Artificial Sequence
  DPV1047
VKRGLKLRHVRPRVTRMDV

SEQ ID NO: 90 - protein, 18 aa, Artificial Sequence
  DPV1048
VKRGLKLRHVRPRVTRDV

SEQ ID NO: 91 - protein, 14 aa, Artificial Sequence
  DPV10
SRRARRSPRHLGSG

SEQ ID NO: 92 - protein, 16 aa, Artificial Sequence
  DPV15
LRRERQSRLRRERQSR

SEQ ID NO: 93 - protein, 22 aa, Artificial Sequence
  DPV15b
GAYDLRRRERQSRLRRRERQSR

SEQ ID NO: 94 - protein, 30 aa, Artificial Sequence
  GALA
WEAALAEALAEALAEHLAEALAEALEALAA

SEQ ID NO: 95 - protein, 21 aa, Artificial Sequence
  Fibrinogen beta chain
KGSWYSMRKMSMKIRPFFPQQ

SEQ ID NO: 96 - protein, 20 aa, Artificial Sequence
  Fibrinogen gamma chain precursor
KTRYYSMKKTTMKIIPFNRL

SEQ ID NO: 97 - protein, 20 aa, Artificial Sequence
  Fibrinogen alpha chain
RGADYSLRAVRMKIRPLVTQ

SEQ ID NO: 98 - protein, 24 aa, Artificial Sequence
  hCT(9-32)
LGTYTQDFNKFHTFPQTAIGVGAP

SEQ ID NO: 99 - protein, 12 aa, Artificial Sequence
  HN-1
TSPLNIHNGQKL

SEQ ID NO: 100 - protein, 12 aa, Artificial Sequence
  Influenza virus nucleoprotein (NLS)
NSAAFEDLRVLS

SEQ ID NO: 101 - protein, 30 aa, Artificial Sequence
  KALA
WEAKLAKALAKALAKHLAKALAKALKACEA

SEQ ID NO: 102 - protein, 10 aa, Artificial Sequence
  Ku70
VPMLKPMLKE

SEQ ID NO: 103 - protein, 18 aa, Artificial Sequence
  MAP
KLALKLALKALKAALKLA

SEQ ID NO: 104 - protein, 27 aa, Artificial Sequence
  MPG
GALFLGFLGAAGSTMGAWSQPKKKRKV

SEQ ID NO: 105 - protein, 16 aa, Artificial Sequence
  Human Fibroblast growth factor 4 (Kaposi Fibroblast growth factor)
AAVALLPAVLLALLAP

SEQ ID NO: 106 - protein, 9 aa, Artificial Sequence
  N50 (NLS of NF-kB P50)
VQRKRQKLM

SEQ ID NO: 107 - protein, 21 aa, Artificial Sequence
  Pep-1
KETWWETWWTEWSQPKKKRKV

SEQ ID NO: 108 - protein, 15 aa, Artificial Sequence
  Pep-7
SDLWEMMMVSLACQY

SEQ ID NO: 109 - protein, 16 aa, Artificial Sequence
  Penetratin
RQIKIWFQNRRMKWKK

SEQ ID NO: 110 - protein, 17 aa, Artificial Sequence
  Penetratin variant
GRQIKIWFQNRRMKWKK

SEQ ID NO: 111 - protein, 7 aa, Artificial Sequence
  Short Penetratin
RRMKWKK

SEQ ID NO: 112 - protein, 17 aa, Artificial Sequence
  Penetratin 42-58
ERQIKIWFQNRRMKWKK

SEQ ID NO: 113 - protein, 7 aa, Artificial Sequence
  Poly Arginine - R7
RRRRRRR

SEQ ID NO: 114 - protein, 9 aa, Artificial Sequence
  Poly Arginine - R9
RRRRRRRRR

SEQ ID NO: 115 - protein, 16 aa, Artificial Sequence
  pISL
RVIRVWFQNKRCKDKK

SEQ ID NO: 116 - protein, 28 aa, Artificial Sequence
  Prion mouse PrPc1-28
MANLGYWLLALFVTMWTDVGLCKKRPKP

SEQ ID NO: 117 - protein, 18 aa, Artificial Sequence
  pVEC
LLIILRRRIRKQAHAHSK

SEQ ID NO: 118 - protein, 16 aa, Artificial Sequence
  pVEC variant
LLIILRRRIRKQAHAH

SEQ ID NO: 119 - protein, 18 aa, Artificial Sequence
  SAP
VRLPPPVRLPPPVRLPPP

SEQ ID NO: 120 - protein, 7 aa, Artificial Sequence
  SV-40 (NLS)
PKKKRKV

SEQ ID NO: 121 - protein, 18 aa, Artificial Sequence
  SynB1
RGGRLSYSRRRFSTSTGR

SEQ ID NO: 122 - protein, 10 aa, Artificial Sequence
  SynB3
RRLSYSRRRF

SEQ ID NO: 123 - protein, 17 aa, Artificial Sequence
  SynB4
AWSFRVSYRGISYRRSR

SEQ ID NO: 124 - protein, 14 aa, Artificial Sequence
  Tat 47-60
YGRKKRRQRRRPPQ

SEQ ID NO: 125 - protein, 11 aa, Artificial Sequence
  Tat 47-57
YGRKKRRQRRR

SEQ ID NO: 126 - protein, 10 aa, Artificial Sequence
  Tat 47-56
YGRKKRRQRR

SEQ ID NO: 127 - protein, 9 aa, Artificial Sequence
  Tat 48-56
GRKKRRQRR

SEQ ID NO: 128 - protein, 10 aa, Artificial Sequence
  Tat 48-57
GRKKRRQRRR

SEQ ID NO: 129 - protein, 9 aa, Artificial Sequence
  Tat 49-57
RKKRRQRRR

SEQ ID NO: 130 - protein, 8 aa, Artificial Sequence
  Tat 49-56
RKKRRQRR

SEQ ID NO: 131 - protein, 13 aa, Artificial Sequence
  Tat 48-60
GRKKRRQRRRPPQ

SEQ ID NO: 132 - protein, 5 aa, Artificial Sequence
  Tat 48-52
GRKKR

SEQ ID NO: 133 - protein, 36 aa, Artificial Sequence
  Tat 37-72
CFITKALGISYGRKKRRQRRRPPQFSQTHQVSLSKQ

SEQ ID NO: 134 - protein, 34 aa, Artificial Sequence
  Tat 38-72
FITKALGISYGRKKRRQRRRPQFSQTHQVSLSKQ

SEQ ID NO: 135 - protein, 13 aa, Artificial Sequence
  Tat 47-59
YGRKKRRQRRRPP

SEQ ID NO: 136 - protein, 27 aa, Artificial Sequence
  Transportan
GWTLNSAGYLLGKINLKALAALAKKIL

SEQ ID NO: 137 - protein, 21 aa, Artificial Sequence
  Transportan 10
AGYLLGKINLKALAALAKKIL

SEQ ID NO: 138 - protein, 12 aa, Artificial Sequence
  Transportan derivative
GWTLNSAGYLLG

SEQ ID NO: 139 - protein, 14 aa, Artificial Sequence
  Transportan derivative
INLKALAALAKKIL

SEQ ID NO: 140 - protein, 34 aa, Artificial Sequence
  VP22
DAATATRGRSAASRPTERPRAPARSASRPRRPVD

SEQ ID NO: 141 - protein, 26 aa, Artificial Sequence
  VT5
DPKGDPKGVTVTVTVTVTGKGDPKPD

SEQ ID NO: 142 - protein, 27 aa, Artificial Sequence
  Signal Sequence-based peptide
GALFLGWLGAAGSTMGAWSQPKKKRKV

SEQ ID NO: 143 - protein, 18 aa, Artificial Sequence
  Amphiphilic model peptide
KLALKLALKALKAALKLA

SEQ ID NO: 144 - protein, 10 aa, Artificial Sequence
  Bacterial cell wall permeating
KFFKFFKFFK

SEQ ID NO: 145 - protein, 37 aa, Artificial Sequence
  LL- 37
LLGDFFRKSKEKIGKEFKRIVQRIKDFLRNLVPRTES

SEQ ID NO: 146 - protein, 31 aa, Artificial Sequence
  Cecropin P1
SWLSKTAKKLENSAKKRISEGIAIAIQGGPR

SEQ ID NO: 147 - protein, 30 aa, Artificial Sequence
  alpha defensin
ACYCRIPACIAGERRYGTCIYQGRLWAFCC

SEQ ID NO: 148 - protein, 36 aa, Artificial Sequence
  beta defensin
DHYNCVSSGGQCLYSACPIFTKIQGTCYRGKAKCCK

SEQ ID NO: 149 - protein, 11 aa, Artificial Sequence
  Bactenecin
RKCRIWIRVCR

SEQ ID NO: 150 - protein, 42 aa, Artificial Sequence
  PR- 39
RRRPRPPYLPRPRPPPFFPPRLPPRIPPGFPPRFPPRFPGKR

SEQ ID NO: 151 - protein, 13 aa, Artificial Sequence
  Indolicidin
ILPWKWPWWPWRR

SEQ ID NO: 152 - protein, 27 aa, Artificial Sequence
  MPS
GALFLGWLGAAGSTMGAWSQPKKKRKV

SEQ ID NO: 153 - protein, 17 aa, Artificial Sequence
  pIs1
PVIRRVWFQNKRCKDKK

SEQ ID NO: 154 - protein, 251 aa, Artificial Sequence
  UROKINASE-TYPE PLASMINOGEN ACTIVATOR (u-PA) protease domain V38D/T97adel/L97bdel/C122S
IIGGEFTTIENQPWFAAIYRRHRGGSDTYVCGGSLISPCWVISATHCFIDYPKKEDYIVYLGRSRLNSNTQGEMKFEVENLILHKDYSADAHHNDIALLKIRSKEGRCAQPSRTIQTISLPSMYNDPQFGTSCEITGFGKENSTDYLYPEQLKMTVVKLISHRECQQPHYYGSEVTTKMLCAADPQWKTDSCQGDSGGPLVCSLQGRMTLTGIVSWGRGCALKDKPGVYTRVSHFLPWIRSHTKEENGLAL

SEQ ID NO: 155 - protein, 253 aa, Artificial Sequence
  UROKINASE-TYPE PLASMINOGEN ACTIVATOR (u-PA) protease domain L73R/L97bG/H99Q/C122S
IIGGEFTTIENQPWFAAIYRRHRGGSVTYVCGGSLISPCWVISATHCFIDYPKKEDYIVYLGRSRRNSNTQGEMKFEVENLILHKDYSADTGAQHNDIALLKIRSKEGRCAQPSRTIQTISLPSMYNDPQFGTSCEITGFGKENSTDYLYPEQLKMTVVKLISHRECQQPHYYGSEVTTKMLCAADPQWKTDSCQGDSGGPLVCSLQGRMTLTGIVSWGRGCALKDKPGVYTRVSHFLPWIRSHTKEENGLAL

SEQ ID NO: 156 - protein, 253 aa, Artificial Sequence
  UROKINASE-TYPE PLASMINOGEN ACTIVATOR (u-PA) protease domain V38D/L73R/L97bG/H99Q/C122S
IIGGEFTTIENQPWFAAIYRRHRGGSDTYVCGGSLISPCWVISATHCFIDYPKKEDYIVYLGRSRRNSNTQGEMKFEVENLILHKDYSADTGAQHNDIALLKIRSKEGRCAQPSRTIQTISLPSMYNDPQFGTSCEITGFGKENSTDYLYPEQLKMTVVKLISHRECQQPHYYGSEVTTKMLCAADPQWKTDSCQGDSGGPLVCSLQGRMTLTGIVSWGRGCALKDKPGVYTRVSHFLPWIRSHTKEENGLAL

SEQ ID NO: 157 - protein, 253 aa, Artificial Sequence
  UROKINASE-TYPE PLASMINOGEN ACTIVATOR (u-PA) protease domain L97bP/H99L/C122S
IIGGEFTTIENQPWFAAIYRRHRGGSVTYVCGGSLISPCWVISATHCFIDYPKKEDYIVYLGRSRLNSNTQGEMKFEVENLILHKDYSADTPALHNDIALLKIRSKEGRCAQPSRTIQTISLPSMYNDPQFGTSCEITGFGKENSTDYLYPEQLKMTVVKLISHRECQQPHYYGSEVTTKMLCAADPQWKTDSCQGDSGGPLVCSLQGRMTLTGIVSWGRGCALKDKPGVYTRVSHFLPWIRSHTKEENGLAL

SEQ ID NO: 158 - protein, 252 aa, Artificial Sequence
  UROKINASE-TYPE PLASMINOGEN ACTIVATOR (u-PA) protease domain R37aP/V38D/V41R/A96D/D97G/T97aN/A98G/L97bdel/H99L/ C122S/M157K/R217F
IIGGEFTTIENQPWFAAIYRRHPGGSDTYRCGGSLISPCWVISATHCFIDYPKKEDYIVYLGRSRLNSNTQGEMKFEVENLILHKDYSDGNGLHNDIALLKIRSKEGRCAQPSRTIQTISLPSMYNDPQFGTSCEITGFGKENSTDYLYPEQLKKTVVKLISHRECQQPHYYGSEVTTKMLCAADPQWKTDSCQGDSGGPLVCSLQGRMTLTGIVSWGFGCALKDKPGVYTRVSHFLPWIRSHTKEENGLAL

SEQ ID NO: 159 - protein, 252 aa, Artificial Sequence
  UROKINASE-TYPE PLASMINOGEN ACTIVATOR (u-PA) protease domain R37aS/G37bD/V38D/V41R/A96D/D97G/T97aN/A98G/L97bdel /H99L/C122S/R217F
IIGGEFTTIENQPWFAAIYRRHSDGSDTYRCGGSLISPCWVISATHCFIDYPKKEDYIVYLGRSRLNSNTQGEMKFEVENLILHKDYSDGNGLHNDIALLKIRSKEGRCAQPSRTIQTISLPSMYNDPQFGTSCEITGFGKENSTDYLYPEQLKMTVVKLISHRECQQPHYYGSEVTTKMLCAADPQWKTDSCQGDSGGPLVCSLQGRMTLTGIVSWGFGCALKDKPGVYTRVSHFLPWIRSHTKEENGLAL

SEQ ID NO: 160 - protein, 251 aa, Artificial Sequence
  UROKINASE-TYPE PLASMINOGEN ACTIVATOR (u-PA) protease domain R36H/V38D/V41R/A96D/D97G/A98R/T97adel/H99L/L97bdel /C122S/M157K/R217D
IIGGEFTTIENQPWFAAIYRHHRGGSDTYRCGGSLISPCWVISATHCFIDYPKKEDYIVYLGRSRLNSNTQGEMKFEVENLILHKDYSDGRLHNDIALLKIRSKEGRCAQPSRTIQTISLPSMYNDPQFGTSCEITGFGKENSTDYLYPEQLKKTVVKLISHRECQQPHYYGSEVTTKMLCAADPQWKTDSCQGDSGGPLVCSLQGRMTLTGIVSWGDGCALKDKPGVYTRVSHFLPWIRSHTKEENGLAL

SEQ ID NO: 161 - protein, 251 aa, Artificial Sequence
  UROKINASE-TYPE PLASMINOGEN ACTIVATOR (u-PA) protease domain R37aH/V38D/V41R/A96D/D97G/A98G/T97adel/H99L/L97bde l/C122S/S174P/R217D
IIGGEFTTIENQPWFAAIYRRHHGGSDTYRCGGSLISPCWVISATHCFIDYPKKEDYIVYLGRSRLNSNTQGEMKFEVENLILHKDYSDGGLHNDIALLKIRSKEGRCAQPSRTIQTISLPSMYNDPQFGTSCEITGFGKENSTDYLYPEQLKMTVVKLISHRECQQPHYYGPEVTTKMLCAADPQWKTDSCQGDSGGPLVCSLQGRMTLTGIVSWGDGCALKDKPGVYTRVSHFLPWIRSHTKEENGLAL

SEQ ID NO: 162 - protein, 252 aa, Artificial Sequence
  UROKINASE-TYPE PLASMINOGEN ACTIVATOR (u-PA) protease domain R37aH/V38D/V41G/A96G/D97E/T97aA/A98G/L97bdel/H99M/ C122S/Y151N
IIGGEFTTIENQPWFAAIYRRHHGGSDTYGCGGSLISPCWVISATHCFIDYPKKEDYIVYLGRSRLNSNTQGEMKFEVENLILHKDYSGEAGMHNDIALLKIRSKEGRCAQPSRTIQTISLPSMYNDPQFGTSCEITGFGKENSTDYLNPEQLKMTVVKLISHRECQQPHYYGSEVTTKMLCAADPQWKTDSCQGDSGGPLVCSLQGRMTLTGIVSWGRGCALKDKPGVYTRVSHFLPWIRSHTKEENGLAL

SEQ ID NO: 163 - protein, 252 aa, Artificial Sequence
  UROKINASE-TYPE PLASMINOGEN ACTIVATOR (u-PA) protease domain R36S/V38D/Y40L/V41R/A96P/D97V/T97aR/A98G/L97bdel/H 99L/C122S
IIGGEFTTIENQPWFAAIYRSHRGGSDTLRCGGSLISPCWVISATHCFIDYPKKEDYIVYLGRSRLNSNTQGEMKFEVENLILHKDYSPVRGLHNDIALLKIRSKEGRCAQPSRTIQTISLPSMYNDPQFGTSCEITGFGKENSTDYLYPEQLKMTVVKLISHRECQQPHYYGSEVTTKMLCAADPQWKTDSCQGDSGGPLVCSLQGRMTLTGIVSWGRGCALKDKPGVYTRVSHFLPWIRSHTKEENGLAL

SEQ ID NO: 164 - protein, 251 aa, Artificial Sequence
  UROKINASE-TYPE PLASMINOGEN ACTIVATOR (u-PA) protease domain R36S/V38D/V41R/A96D/D97G/A98G/T97adel/H99L/L97bdel /C122S/M157K/R217D
IIGGEFTTIENQPWFAAIYRSHRGGSDTYRCGGSLISPCWVISATHCFIDYPKKEDYIVYLGRSRLNSNTQGEMKFEVENLILHKDYSDGGLHNDIALLKIRSKEGRCAQPSRTIQTISLPSMYNDPQFGTSCEITGFGKENSTDYLYPEQLKKTVVKLISHRECQQPHYYGSEVTTKMLCAADPQWKTDSCQGDSGGPLVCSLQGRMTLTGIVSWGDGCALKDKPGVYTRVSHFLPWIRSHTKEENGLAL

SEQ ID NO: 165 - protein, 251 aa, Artificial Sequence
  UROKINASE-TYPE PLASMINOGEN ACTIVATOR (u-PA) protease domain V38D/V41R/A96D/D97G/A98G/T97adel/H99L/L97bdel/C122 S/Q192E/R217D
IIGGEFTTIENQPWFAAIYRRHRGGSDTYRCGGSLISPCWVISATHCFIDYPKKEDYIVYLGRSRLNSNTQGEMKFEVENLILHKDYSDGGLHNDIALLKIRSKEGRCAQPSRTIQTISLPSMYNDPQFGTSCEITGFGKENSTDYLYPEQLKMTVVKLISHRECQQPHYYGSEVTTKMLCAADPQWKTDSCEGDSGGPLVCSLQGRMTLTGIVSWGDGCALKDKPGVYTRVSHFLPWIRSHTKEENGLAL

SEQ ID NO: 166 - protein, 251 aa, Artificial Sequence
  UROKINASE-TYPE PLASMINOGEN ACTIVATOR (u-PA) protease domain F30Y/V38D/V41R/A96D/D97G/A98G/T97adel/H99L/L97bdel /C122S/M157K/R217D
IIGGEFTTIENQPWYAAIYRRHRGGSDTYRCGGSLISPCWVISATHCFIDYPKKEDYIVYLGRSRLNSNTQGEMKFEVENLILHKDYSDGGLHNDIALLKIRSKEGRCAQPSRTIQTISLPSMYNDPQFGTSCEITGFGKENSTDYLYPEQLKKTVVKLISHRECQQPHYYGSEVTTKMLCAADPQWKTDSCQGDSGGPLVCSLQGRMTLTGIVSWGDGCALKDKPGVYTRVSHFLPWIRSHTKEENGLAL

SEQ ID NO: 167 - protein, 253 aa, Artificial Sequence
  UROKINASE-TYPE PLASMINOGEN ACTIVATOR (u-PA) protease domain V38D/Y40P/V41K/L97bA/H99Q/C122S
IIGGEFTTIENQPWFAAIYRRHRGGSDTPKCGGSLISPCWVISATHCFIDYPKKEDYIVYLGRSRLNSNTQGEMKFEVENLILHKDYSADTAAQHNDIALLKIRSKEGRCAQPSRTIQTISLPSMYNDPQFGTSCEITGFGKENSTDYLYPEQLKMTVVKLISHRECQQPHYYGSEVTTKMLCAADPQWKTDSCQGDSGGPLVCSLQGRMTLTGIVSWGRGCALKDKPGVYTRVSHFLPWIRSHTKEENGLAL

SEQ ID NO: 168 - protein, 253 aa, Artificial Sequence
  UROKINASE-TYPE PLASMINOGEN ACTIVATOR (u-PA) protease domain V38D/Y40P/V41K/L97bA/H99Q/C122S/M157K
IIGGEFTTIENQPWFAAIYRRHRGGSDTPKCGGSLISPCWVISATHCFIDYPKKEDYIVYLGRSRLNSNTQGEMKFEVENLILHKDYSADTAAQHNDIALLKIRSKEGRCAQPSRTIQTISLPSMYNDPQFGTSCEITGFGKENSTDYLYPEQLKKTVVKLISHRECQQPHYYGSEVTTKMLCAADPQWKTDSCQGDSGGPLVCSLQGRMTLTGIVSWGRGCALKDKPGVYTRVSHFLPWIRSHTKEENGLAL

SEQ ID NO: 169 - protein, 251 aa, Artificial Sequence
  UROKINASE-TYPE PLASMINOGEN ACTIVATOR (u-PA) protease domain V38D/V41R/A96E/D97G/A98G/T97adel/H99L/L97bdel/C122 S/Y151L/T178S/Q192E/R217D
IIGGEFTTIENQPWFAAIYRRHRGGSDTYRCGGSLISPCWVISATHCFIDYPKKEDYIVYLGRSRLNSNTQGEMKFEVENLILHKDYSEGGLHNDIALLKIRSKEGRCAQPSRTIQTISLPSMYNDPQFGTSCEITGFGKENSTDYLLPEQLKMTVVKLISHRECQQPHYYGSEVTSKMLCAADPQWKTDSCEGDSGGPLVCSLQGRMTLTGIVSWGDGCALKDKPGVYTRVSHFLPWIRSHTKEENGLAL

SEQ ID NO: 170 - protein, 253 aa, Artificial Sequence
  UROKINASE-TYPE PLASMINOGEN ACTIVATOR (u-PA) protease domain F30Y/V38D/Y40H/V41R/L97bA/H99Q/C122S/M157K/R217D
IIGGEFTTIENQPWYAAIYRRHRGGSDTHRCGGSLISPCWVISATHCFIDYPKKEDYIVYLGRSRLNSNTQGEMKFEVENLILHKDYSADTAAQHNDIALLKIRSKEGRCAQPSRTIQTISLPSMYNDPQFGTSCEITGFGKENSTDYLYPEQLKKTVVKLISHRECQQPHYYGSEVTTKMLCAADPQWKTDSCQGDSGGPLVCSLQGRMTLTGIVSWGDGCALKDKPGVYTRVSHFLPWIRSHTKEENGLAL

SEQ ID NO: 171 - protein, 253 aa, Artificial Sequence
  UROKINASE-TYPE PLASMINOGEN ACTIVATOR (u-PA) protease domain F30H/V38D/V41R/L97bA/H99Q/Y151L/M157K
IIGGEFTTIENQPWHAAIYRRHRGGSDTYRCGGSLISPCWVISATHCFIDYPKKEDYIVYLGRSRLNSNTQGEMKFEVENLILHKDYSADTAAQHNDIALLKIRSKEGRCAQPSRTIQTICLPSMYNDPQFGTSCEITGFGKENSTDYLLPEQLKKTVVKLISHRECQQPHYYGSEVTTKMLCAADPQWKTDSCQGDSGGPLVCSLQGRMTLTGIVSWGRGCALKDKPGVYTRVSHFLPWIRSHTKEENGLAL

SEQ ID NO: 172 - protein, 253 aa, Artificial Sequence
  UROKINASE-TYPE PLASMINOGEN ACTIVATOR (u-PA) protease domain F30Y/V38D/V41R/L97bV/H99Q/C122S/Y151F/M157K
IIGGEFTTIENQPWYAAIYRRHRGGSDTYRCGGSLISPCWVISATHCFIDYPKKEDYIVYLGRSRLNSNTQGEMKFEVENLILHKDYSADTVAQHNDIALLKIRSKEGRCAQPSRTIQTISLPSMYNDPQFGTSCEITGFGKENSTDYLFPEQLKKTVVKLISHRECQQPHYYGSEVTTKMLCAADPQWKTDSCQGDSGGPLVCSLQGRMTLTGIVSWGRGCALKDKPGVYTRVSHFLPWIRSHTKEENGLAL

SEQ ID NO: 173 - protein, 253 aa, Artificial Sequence
  UROKINASE-TYPE PLASMINOGEN ACTIVATOR (u-PA) protease domain F30H/V38D/V41R/L97bV/H99Q/C122S/Y151L/M157K
IIGGEFTTIENQPWHAAIYRRHRGGSDTYRCGGSLISPCWVISATHCFIDYPKKEDYIVYLGRSRLNSNTQGEMKFEVENLILHKDYSADTVAQHNDIALLKIRSKEGRCAQPSRTIQTISLPSMYNDPQFGTSCEITGFGKENSTDYLLPEQLKKTVVKLISHRECQQPHYYGSEVTTKMLCAADPQWKTDSCQGDSGGPLVCSLQGRMTLTGIVSWGRGCALKDKPGVYTRVSHFLPWIRSHTKEENGLAL

SEQ ID NO: 174 - protein, 253 aa, Artificial Sequence
  UROKINASE-TYPE PLASMINOGEN ACTIVATOR (u-PA) protease domain F30H/V38D/V41R/L97bA/H99Q/C122S/Y151F/M157K
IIGGEFTTIENQPWHAAIYRRHRGGSDTYRCGGSLISPCWVISATHCFIDYPKKEDYIVYLGRSRLNSNTQGEMKFEVENLILHKDYSADTAAQHNDIALLKIRSKEGRCAQPSRTIQTISLPSMYNDPQFGTSCEITGFGKENSTDYLFPEQLKKTVVKLISHRECQQPHYYGSEVTTKMLCAADPQWKTDSCQGDSGGPLVCSLQGRMTLTGIVSWGRGCALKDKPGVYTRVSHFLPWIRSHTKEENGLAL

SEQ ID NO: 175 - protein, 253 aa, Artificial Sequence
  UROKINASE-TYPE PLASMINOGEN ACTIVATOR (u-PA) protease domain F30H/V38D/V41R/L97bA/H99Q/C122S/Y151M/M157K
IIGGEFTTIENQPWHAAIYRRHRGGSDTYRCGGSLISPCWVISATHCFIDYPKKEDYIVYLGRSRLNSNTQGEMKFEVENLILHKDYSADTAAQHNDIALLKIRSKEGRCAQPSRTIQTISLPSMYNDPQFGTSCEITGFGKENSTDYLMPEQLKKTVVKLISHRECQQPHYYGSEVTTKMLCAADPQWKTDSCQGDSGGPLVCSLQGRMTLTGIVSWGRGCALKDKPGVYTRVSHFLPWIRSHTKEENGLAL

SEQ ID NO: 176 - protein, 253 aa, Artificial Sequence
  UROKINASE-TYPE PLASMINOGEN ACTIVATOR (u-PA) protease domain F30H/V38D/V41R/L97bA/H99Q/C122S/Y149N/Y151L/M157K
IIGGEFTTIENQPWHAAIYRRHRGGSDTYRCGGSLISPCWVISATHCFIDYPKKEDYIVYLGRSRLNSNTQGEMKFEVENLILHKDYSADTAAQHNDIALLKIRSKEGRCAQPSRTIQTISLPSMYNDPQFGTSCEITGFGKENSTDNLLPEQLKKTVVKLISHRECQQPHYYGSEVTTKMLCAADPQWKTDSCQGDSGGPLVCSLQGRMTLTGIVSWGRGCALKDKPGVYTRVSHFLPWIRSHTKEENGLAL

SEQ ID NO: 177 - protein, 253 aa, Artificial Sequence
  UROKINASE-TYPE PLASMINOGEN ACTIVATOR (u-PA) protease domain F30H/V38D/V41R/L97bA/H99Q/C122S/Y149N/Y151F/M157K
IIGGEFTTIENQPWHAAIYRRHRGGSDTYRCGGSLISPCWVISATHCFIDYPKKEDYIVYLGRSRLNSNTQGEMKFEVENLILHKDYSADTAAQHNDIALLKIRSKEGRCAQPSRTIQTISLPSMYNDPQFGTSCEITGFGKENSTDNLFPEQLKKTVVKLISHRECQQPHYYGSEVTTKMLCAADPQWKTDSCQGDSGGPLVCSLQGRMTLTGIVSWGRGCALKDKPGVYTRVSHFLPWIRSHTKEENGLAL

SEQ ID NO: 178 - protein, 253 aa, Artificial Sequence
  UROKINASE-TYPE PLASMINOGEN ACTIVATOR (u-PA) protease domain F30Y/V38D/V41R/L97bV/H99Q/C122S/M157K
IIGGEFTTIENQPWYAAIYRRHRGGSDTYRCGGSLISPCWVISATHCFIDYPKKEDYIVYLGRSRLNSNTQGEMKFEVENLILHKDYSADTVAQHNDIALLKIRSKEGRCAQPSRTIQTISLPSMYNDPQFGTSCEITGFGKENSTDYLYPEQLKKTVVKLISHRECQQPHYYGSEVTTKMLCAADPQWKTDSCQGDSGGPLVCSLQGRMTLTGIVSWGRGCALKDKPGVYTRVSHFLPWIRSHTKEENGLAL

SEQ ID NO: 179 - protein, 253 aa, Artificial Sequence
  UROKINASE-TYPE PLASMINOGEN ACTIVATOR (u-PA) protease domain F30H/V38D/V41R/L97bV/H99Q/C122S/Y151F/M157K
IIGGEFTTIENQPWHAAIYRRHRGGSDTYRCGGSLISPCWVISATHCFIDYPKKEDYIVYLGRSRLNSNTQGEMKFEVENLILHKDYSADTVAQHNDIALLKIRSKEGRCAQPSRTIQTISLPSMYNDPQFGTSCEITGFGKENSTDYLFPEQLKKTVVKLISHRECQQPHYYGSEVTTKMLCAADPQWKTDSCQGDSGGPLVCSLQGRMTLTGIVSWGRGCALKDKPGVYTRVSHFLPWIRSHTKEENGLAL

SEQ ID NO: 180 - protein, 253 aa, Artificial Sequence
  UROKINASE-TYPE PLASMINOGEN ACTIVATOR (u-PA) protease domain F30H/V38D/V41R/L97bV/H99Q/C122S/Y149N/Y151F/M157K
IIGGEFTTIENQPWHAAIYRRHRGGSDTYRCGGSLISPCWVISATHCFIDYPKKEDYIVYLGRSRLNSNTQGEMKFEVENLILHKDYSADTVAQHNDIALLKIRSKEGRCAQPSRTIQTISLPSMYNDPQFGTSCEITGFGKENSTDNLFPEQLKKTVVKLISHRECQQPHYYGSEVTTKMLCAADPQWKTDSCQGDSGGPLVCSLQGRMTLTGIVSWGRGCALKDKPGVYTRVSHFLPWIRSHTKEENGLAL

SEQ ID NO: 181 - protein, 253 aa, Artificial Sequence
  UROKINASE-TYPE PLASMINOGEN ACTIVATOR (u-PA) protease domain F30Y/V38D/V41R/L97bV/H99Q/C122S/Y149N/Y151F/M157K
IIGGEFTTIENQPWYAAIYRRHRGGSDTYRCGGSLISPCWVISATHCFIDYPKKEDYIVYLGRSRLNSNTQGEMKFEVENLILHKDYSADTVAQHNDIALLKIRSKEGRCAQPSRTIQTISLPSMYNDPQFGTSCEITGFGKENSTDNLFPEQLKKTVVKLISHRECQQPHYYGSEVTTKMLCAADPQWKTDSCQGDSGGPLVCSLQGRMTLTGIVSWGRGCALKDKPGVYTRVSHFLPWIRSHTKEENGLAL

SEQ ID NO: 182 - protein, 253 aa, Artificial Sequence
  UROKINASE-TYPE PLASMINOGEN ACTIVATOR (u-PA) protease domain F30Y/V38D/Y40H/V41R/L97bA/H99Q/C122S/M157K/R217G
IIGGEFTTIENQPWYAAIYRRHRGGSDTHRCGGSLISPCWVISATHCFIDYPKKEDYIVYLGRSRLNSNTQGEMKFEVENLILHKDYSADTAAQHNDIALLKIRSKEGRCAQPSRTIQTISLPSMYNDPQFGTSCEITGFGKENSTDYLYPEQLKKTVVKLISHRECQQPHYYGSEVTTKMLCAADPQWKTDSCQGDSGGPLVCSLQGRMTLTGIVSWGGGCALKDKPGVYTRVSHFLPWIRSHTKEENGLAL

SEQ ID NO: 183 - protein, 253 aa, Artificial Sequence
  UROKINASE-TYPE PLASMINOGEN ACTIVATOR (u-PA) protease domain F30Y/V38D/Y40H/V41R/L97bA/H99Q/C122S/M157K/R217E
IIGGEFTTIENQPWYAAIYRRHRGGSDTHRCGGSLISPCWVISATHCFIDYPKKEDYIVYLGRSRLNSNTQGEMKFEVENLILHKDYSADTAAQHNDIALLKIRSKEGRCAQPSRTIQTISLPSMYNDPQFGTSCEITGFGKENSTDYLYPEQLKKTVVKLISHRECQQPHYYGSEVTTKMLCAADPQWKTDSCQGDSGGPLVCSLQGRMTLTGIVSWGEGCALKDKPGVYTRVSHFLPWIRSHTKEENGLAL

SEQ ID NO: 184 - protein, 253 aa, Artificial Sequence
  UROKINASE-TYPE PLASMINOGEN ACTIVATOR (u-PA) protease domain F30H/V38D/V41R/L97bA/H99Q/C122S/Y151L/M157K/R217D
IIGGEFTTIENQPWHAAIYRRHRGGSDTYRCGGSLISPCWVISATHCFIDYPKKEDYIVYLGRSRLNSNTQGEMKFEVENLILHKDYSADTAAQHNDIALLKIRSKEGRCAQPSRTIQTISLPSMYNDPQFGTSCEITGFGKENSTDYLLPEQLKKTVVKLISHRECQQPHYYGSEVTTKMLCAADPQWKTDSCQGDSGGPLVCSLQGRMTLTGIVSWGDGCALKDKPGVYTRVSHFLPWIRSHTKEENGLAL

SEQ ID NO: 185 - protein, 253 aa, Artificial Sequence
  UROKINASE-TYPE PLASMINOGEN ACTIVATOR (u-PA) protease domain F30Y/V38D/Y40H/V41R/L97bA/H99Q/C122S/Y149L/M157K/R 217G
IIGGEFTTIENQPWYAAIYRRHRGGSDTHRCGGSLISPCWVISATHCFIDYPKKEDYIVYLGRSRLNSNTQGEMKFEVENLILHKDYSADTAAQHNDIALLKIRSKEGRCAQPSRTIQTISLPSMYNDPQFGTSCEITGFGKENSTDLLYPEQLKKTVVKLISHRECQQPHYYGSEVTTKMLCAADPQWKTDSCQGDSGGPLVCSLQGRMTLTGIVSWGGGCALKDKPGVYTRVSHFLPWIRSHTKEENGLAL

SEQ ID NO: 186 - protein, 253 aa, Artificial Sequence
  UROKINASE-TYPE PLASMINOGEN ACTIVATOR (u-PA) protease domain F30Y/V38D/Y40H/V41R/L97bA/H99Q/C122S/Y149L/M157K/R 217E
IIGGEFTTIENQPWYAAIYRRHRGGSDTHRCGGSLISPCWVISATHCFIDYPKKEDYIVYLGRSRLNSNTQGEMKFEVENLILHKDYSADTAAQHNDIALLKIRSKEGRCAQPSRTIQTISLPSMYNDPQFGTSCEITGFGKENSTDLLYPEQLKKTVVKLISHRECQQPHYYGSEVTTKMLCAADPQWKTDSCQGDSGGPLVCSLQGRMTLTGIVSWGEGCALKDKPGVYTRVSHFLPWIRSHTKEENGLAL

SEQ ID NO: 187 - protein, 253 aa, Artificial Sequence
  UROKINASE-TYPE PLASMINOGEN ACTIVATOR (u-PA) protease domain F30Y/V38D/Y40H/V41R/L97bA/H99Q/C122S/Y149L/M157K/R 217D
IIGGEFTTIENQPWYAAIYRRHRGGSDTHRCGGSLISPCWVISATHCFIDYPKKEDYIVYLGRSRLNSNTQGEMKFEVENLILHKDYSADTAAQHNDIALLKIRSKEGRCAQPSRTIQTISLPSMYNDPQFGTSCEITGFGKENSTDLLYPEQLKKTVVKLISHRECQQPHYYGSEVTTKMLCAADPQWKTDSCQGDSGGPLVCSLQGRMTLTGIVSWGDGCALKDKPGVYTRVSHFLPWIRSHTKEENGLAL

SEQ ID NO: 188 - protein, 253 aa, Artificial Sequence
  UROKINASE-TYPE PLASMINOGEN ACTIVATOR (u-PA) protease domain F30Y/V38D/Y40H/V41R/L97bA/H99Q/C122S/Y149F/M157K/R 217G
IIGGEFTTIENQPWYAAIYRRHRGGSDTHRCGGSLISPCWVISATHCFIDYPKKEDYIVYLGRSRLNSNTQGEMKFEVENLILHKDYSADTAAQHNDIALLKIRSKEGRCAQPSRTIQTISLPSMYNDPQFGTSCEITGFGKENSTDFLYPEQLKKTVVKLISHRECQQPHYYGSEVTTKMLCAADPQWKTDSCQGDSGGPLVCSLQGRMTLTGIVSWGGGCALKDKPGVYTRVSHFLPWIRSHTKEENGLAL

SEQ ID NO: 189 - protein, 253 aa, Artificial Sequence
  UROKINASE-TYPE PLASMINOGEN ACTIVATOR (u-PA) protease domain F30Y/V38D/Y40H/V41R/L97bA/H99Q/C122S/Y149F/M157K/R 217E
IIGGEFTTIENQPWYAAIYRRHRGGSDTHRCGGSLISPCWVISATHCFIDYPKKEDYIVYLGRSRLNSNTQGEMKFEVENLILHKDYSADTAAQHNDIALLKIRSKEGRCAQPSRTIQTISLPSMYNDPQFGTSCEITGFGKENSTDFLYPEQLKKTVVKLISHRECQQPHYYGSEVTTKMLCAADPQWKTDSCQGDSGGPLVCSLQGRMTLTGIVSWGEGCALKDKPGVYTRVSHFLPWIRSHTKEENGLAL

SEQ ID NO: 190 - protein, 253 aa, Artificial Sequence
  UROKINASE-TYPE PLASMINOGEN ACTIVATOR (u-PA) protease domain F30Y/V38D/Y40H/V41R/L97bA/H99Q/C122S/Y149F/M157K/R 217D
IIGGEFTTIENQPWYAAIYRRHRGGSDTHRCGGSLISPCWVISATHCFIDYPKKEDYIVYLGRSRLNSNTQGEMKFEVENLILHKDYSADTAAQHNDIALLKIRSKEGRCAQPSRTIQTISLPSMYNDPQFGTSCEITGFGKENSTDFLYPEQLKKTVVKLISHRECQQPHYYGSEVTTKMLCAADPQWKTDSCQGDSGGPLVCSLQGRMTLTGIVSWGDGCALKDKPGVYTRVSHFLPWIRSHTKEENGLAL

SEQ ID NO: 191 - protein, 253 aa, Artificial Sequence
  UROKINASE-TYPE PLASMINOGEN ACTIVATOR (u-PA) protease domain F30Y/R35Q/V38D/Y40H/V41R/L97bA/H99Q/C122S/Y149L/M1 57K/R217E
IIGGEFTTIENQPWYAAIYQRHRGGSDTHRCGGSLISPCWVISATHCFIDYPKKEDYIVYLGRSRLNSNTQGEMKFEVENLILHKDYSADTAAQHNDIALLKIRSKEGRCAQPSRTIQTISLPSMYNDPQFGTSCEITGFGKENSTDLLYPEQLKKTVVKLISHRECQQPHYYGSEVTTKMLCAADPQWKTDSCQGDSGGPLVCSLQGRMTLTGIVSWGEGCALKDKPGVYTRVSHFLPWIRSHTKEENGLAL

SEQ ID NO: 192 - protein, 253 aa, Artificial Sequence
  UROKINASE-TYPE PLASMINOGEN ACTIVATOR (u-PA) protease domain F30Y/R35Q/V38D/Y40H/V41R/L97bA/H99Q/C122S/Y149L/M1 57K/R217G
IIGGEFTTIENQPWYAAIYQRHRGGSDTHRCGGSLISPCWVISATHCFIDYPKKEDYIVYLGRSRLNSNTQGEMKFEVENLILHKDYSADTAAQHNDIALLKIRSKEGRCAQPSRTIQTISLPSMYNDPQFGTSCEITGFGKENSTDLLYPEQLKKTVVKLISHRECQQPHYYGSEVTTKMLCAADPQWKTDSCQGDSGGPLVCSLQGRMTLTGIVSWGGGCALKDKPGVYTRVSHFLPWIRSHTKEENGLAL

SEQ ID NO: 193 - protein, 253 aa, Artificial Sequence
  UROKINASE-TYPE PLASMINOGEN ACTIVATOR (u-PA) protease domain F30Y/H37D/V38D/Y40H/V41R/L97bA/H99Q/C122S/Y149L/M1 57K/R217E
IIGGEFTTIENQPWYAAIYRRDRGGSDTHRCGGSLISPCWVISATHCFIDYPKKEDYIVYLGRSRLNSNTQGEMKFEVENLILHKDYSADTAAQHNDIALLKIRSKEGRCAQPSRTIQTISLPSMYNDPQFGTSCEITGFGKENSTDLLYPEQLKKTVVKLISHRECQQPHYYGSEVTTKMLCAADPQWKTDSCQGDSGGPLVCSLQGRMTLTGIVSWGEGCALKDKPGVYTRVSHFLPWIRSHTKEENGLAL

SEQ ID NO: 194 - protein, 253 aa, Artificial Sequence
  UROKINASE-TYPE PLASMINOGEN ACTIVATOR (u-PA) protease domain F30Y/H37D/V38D/Y40H/V41R/L97bA/H99Q/C122S/Y149L/M1 57K/R217G
IIGGEFTTIENQPWYAAIYRRDRGGSDTHRCGGSLISPCWVISATHCFIDYPKKEDYIVYLGRSRLNSNTQGEMKFEVENLILHKDYSADTAAQHNDIALLKIRSKEGRCAQPSRTIQTISLPSMYNDPQFGTSCEITGFGKENSTDLLYPEQLKKTVVKLISHRECQQPHYYGSEVTTKMLCAADPQWKTDSCQGDSGGPLVCSLQGRMTLTGIVSWGGGCALKDKPGVYTRVSHFLPWIRSHTKEENGLAL

SEQ ID NO: 195 - protein, 254 aa, Artificial Sequence
  UROKINASE-TYPE PLASMINOGEN ACTIVATOR (u-PA) protease domain F30Y/V38D/Y40H/V41R/L97bA/H99Q/C122S/Y149L/M157K
IIGGEFTTIENQPWYAAIYRRHRGGSDTHRCGGSLISPCWVISATHCFIDYPKKEDYIVYLGRSRLNSNTQGEMKFEVENLILHKDYSADTAAQHHNDIALLKIRSKEGRCAQPSRTIQTISLPSMYNDPQFGTSCEITGFGKENSTDLLYPEQLKKTVVKLISHRECQQPHYYGSEVTTKMLCAADPQWKTDSCQGDSGGPLVCSLQGRMTLTGIVSWGRGCALKDKPGVYTRVSHFLPWIRSHTKEENGLAL

SEQ ID NO: 196 - protein, 254 aa, Artificial Sequence
  UROKINASE-TYPE PLASMINOGEN ACTIVATOR (u-PA) protease domain F30Y/V38D/Y40H/V41R/L97bA/H99Q/C122S/Y149F/M157K
IIGGEFTTIENQPWYAAIYRRHRGGSDTHRCGGSLISPCWVISATHCFIDYPKKEDYIVYLGRSRLNSNTQGEMKFEVENLILHKDYSADTAAQHHNDIALLKIRSKEGRCAQPSRTIQTISLPSMYNDPQFGTSCEITGFGKENSTDFLYPEQLKKTVVKLISHRECQQPHYYGSEVTTKMLCAADPQWKTDSCQGDSGGPLVCSLQGRMTLTGIVSWGRGCALKDKPGVYTRVSHFLPWIRSHTKEENGLAL

SEQ ID NO: 197 - protein, 253 aa, Artificial Sequence
  UROKINASE-TYPE PLASMINOGEN ACTIVATOR (u-PA) protease domain I17L/F30Y/V38D/Y40H/V41R/L97bA/H99Q/C122S/M157K
ILGGEFTTIENQPWYAAIYRRHRGGSDTHRCGGSLISPCWVISATHCFIDYPKKEDYIVYLGRSRLNSNTQGEMKFEVENLILHKDYSADTAAQHNDIALLKIRSKEGRCAQPSRTIQTISLPSMYNDPQFGTSCEITGFGKENSTDYLYPEQLKKTVVKLISHRECQQPHYYGSEVTTKMLCAADPQWKTDSCQGDSGGPLVCSLQGRMTLTGIVSWGRGCALKDKPGVYTRVSHFLPWIRSHTKEENGLAL

SEQ ID NO: 198 - protein, 253 aa, Artificial Sequence
  UROKINASE-TYPE PLASMINOGEN ACTIVATOR (u-PA) protease domain I17V/F30Y/V38D/Y40H/V41R/L97bA/H99Q/C122S/M157K
IVGGEFTTIENQPWYAAIYRRHRGGSDTHRCGGSLISPCWVISATHCFIDYPKKEDYIVYLGRSRLNSNTQGEMKFEVENLILHKDYSADTAAQHNDIALLKIRSKEGRCAQPSRTIQTISLPSMYNDPQFGTSCEITGFGKENSTDYLYPEQLKKTVVKLISHRECQQPHYYGSEVTTKMLCAADPQWKTDSCQGDSGGPLVCSLQGRMTLTGIVSWGRGCALKDKPGVYTRVSHFLPWIRSHTKEENGLAL

SEQ ID NO: 199 - protein, 254 aa, Artificial Sequence
  UROKINASE-TYPE PLASMINOGEN ACTIVATOR (u-PA) protease domain F30Y/V38D/Y40H/V41R/L97bA/H99Q/C122S/Y149W/M157K
IIGGEFTTIENQPWYAAIYRRHRGGSDTHRCGGSLISPCWVISATHCFIDYPKKEDYIVYLGRSRLNSNTQGEMKFEVENLILHKDYSADTAAQHHNDIALLKIRSKEGRCAQPSRTIQTISLPSMYNDPQFGTSCEITGFGKENSTDWLYPEQLKKTVVKLISHRECQQPHYYGSEVTTKMLCAADPQWKTDSCQGDSGGPLVCSLQGRMTLTGIVSWGRGCALKDKPGVYTRVSHFLPWIRSHTKEENGLAL

SEQ ID NO: 200 - protein, 254 aa, Artificial Sequence
  UROKINASE-TYPE PLASMINOGEN ACTIVATOR (u-PA) protease domain F30Y/R35Q/V38D/Y40H/V41R/L97bA/H99Q/C122S/Y149L/M1 57K
IIGGEFTTIENQPWYAAIYQRHRGGSDTHRCGGSLISPCWVISATHCFIDYPKKEDYIVYLGRSRLNSNTQGEMKFEVENLILHKDYSADTAAQHHNDIALLKIRSKEGRCAQPSRTIQTISLPSMYNDPQFGTSCEITGFGKENSTDLLYPEQLKKTVVKLISHRECQQPHYYGSEVTTKMLCAADPQWKTDSCQGDSGGPLVCSLQGRMTLTGIVSWGRGCALKDKPGVYTRVSHFLPWIRSHTKEENGLAL

SEQ ID NO: 201 - protein, 254 aa, Artificial Sequence
  UROKINASE-TYPE PLASMINOGEN ACTIVATOR (u-PA) protease domain F30Y/R35Q/V38D/Y40H/V41R/L97bA/H99Q/C122S/Y149W/M1 57K
IIGGEFTTIENQPWYAAIYQRHRGGSDTHRCGGSLISPCWVISATHCFIDYPKKEDYIVYLGRSRLNSNTQGEMKFEVENLILHKDYSADTAAQHHNDIALLKIRSKEGRCAQPSRTIQTISLPSMYNDPQFGTSCEITGFGKENSTDWLYPEQLKKTVVKLISHRECQQPHYYGSEVTTKMLCAADPQWKTDSCQGDSGGPLVCSLQGRMTLTGIVSWGRGCALKDKPGVYTRVSHFLPWIRSHTKEENGLAL

SEQ ID NO: 202 - protein, 254 aa, Artificial Sequence
  UROKINASE-TYPE PLASMINOGEN ACTIVATOR (u-PA) protease domain F30Y/R35Q/V38D/Y40H/V41R/L97bA/H99Q/C122S/Y149F/M1 57K
IIGGEFTTIENQPWYAAIYQRHRGGSDTHRCGGSLISPCWVISATHCFIDYPKKEDYIVYLGRSRLNSNTQGEMKFEVENLILHKDYSADTAAQHHNDIALLKIRSKEGRCAQPSRTIQTISLPSMYNDPQFGTSCEITGFGKENSTDFLYPEQLKKTVVKLISHRECQQPHYYGSEVTTKMLCAADPQWKTDSCQGDSGGPLVCSLQGRMTLTGIVSWGRGCALKDKPGVYTRVSHFLPWIRSHTKEENGLAL

SEQ ID NO: 203 - protein, 253 aa, Artificial Sequence
  UROKINASE-TYPE PLASMINOGEN ACTIVATOR (u-PA) protease domain F30Y/R35Q/V38D/Y40H/V41R/L97bA/H99Q/C122S/M157K
IIGGEFTTIENQPWYAAIYQRHRGGSDTHRCGGSLISPCWVISATHCFIDYPKKEDYIVYLGRSRLNSNTQGEMKFEVENLILHKDYSADTAAQHNDIALLKIRSKEGRCAQPSRTIQTISLPSMYNDPQFGTSCEITGFGKENSTDYLYPEQLKKTVVKLISHRECQQPHYYGSEVTTKMLCAADPQWKTDSCQGDSGGPLVCSLQGRMTLTGIVSWGRGCALKDKPGVYTRVSHFLPWIRSHTKEENGLAL

SEQ ID NO: 204 - protein, 253 aa, Artificial Sequence
  UROKINASE-TYPE PLASMINOGEN ACTIVATOR (u-PA) protease domain F30Y/H37T/V38D/Y40H/V41R/L97bA/H99Q/C122S/Y149L/M1 57K
IIGGEFTTIENQPWYAAIYRRTRGGSDTHRCGGSLISPCWVISATHCFIDYPKKEDYIVYLGRSRLNSNTQGEMKFEVENLILHKDYSADTAAQHNDIALLKIRSKEGRCAQPSRTIQTISLPSMYNDPQFGTSCEITGFGKENSTDLLYPEQLKKTVVKLISHRECQQPHYYGSEVTTKMLCAADPQWKTDSCQGDSGGPLVCSLQGRMTLTGIVSWGRGCALKDKPGVYTRVSHFLPWIRSHTKEENGLAL

SEQ ID NO: 205 - protein, 253 aa, Artificial Sequence
  UROKINASE-TYPE PLASMINOGEN ACTIVATOR (u-PA) protease domain F30Y/H37T/V38D/Y40H/V41R/L97bA/H99Q/C122S/Y149F/M1 57K
IIGGEFTTIENQPWYAAIYRRTRGGSDTHRCGGSLISPCWVISATHCFIDYPKKEDYIVYLGRSRLNSNTQGEMKFEVENLILHKDYSADTAAQHNDIALLKIRSKEGRCAQPSRTIQTISLPSMYNDPQFGTSCEITGFGKENSTDFLYPEQLKKTVVKLISHRECQQPHYYGSEVTTKMLCAADPQWKTDSCQGDSGGPLVCSLQGRMTLTGIVSWGRGCALKDKPGVYTRVSHFLPWIRSHTKEENGLAL

SEQ ID NO: 206 - protein, 253 aa, Artificial Sequence
  UROKINASE-TYPE PLASMINOGEN ACTIVATOR (u-PA) protease domain F30Y/H37T/V38D/Y40H/V41R/L97bA/H99Q/C122S/M157K
IIGGEFTTIENQPWYAAIYRRTRGGSDTHRCGGSLISPCWVISATHCFIDYPKKEDYIVYLGRSRLNSNTQGEMKFEVENLILHKDYSADTAAQHNDIALLKIRSKEGRCAQPSRTIQTISLPSMYNDPQFGTSCEITGFGKENSTDYLYPEQLKKTVVKLISHRECQQPHYYGSEVTTKMLCAADPQWKTDSCQGDSGGPLVCSLQGRMTLTGIVSWGRGCALKDKPGVYTRVSHFLPWIRSHTKEENGLAL

SEQ ID NO: 207 - protein, 253 aa, Artificial Sequence
  UROKINASE-TYPE PLASMINOGEN ACTIVATOR (u-PA) protease domain F30Y/R35Q/H37T/V38D/Y40H/V41R/L97bA/H99Q/C122S/Y14 9L/M157K
IIGGEFTTIENQPWYAAIYQRTRGGSDTHRCGGSLISPCWVISATHCFIDYPKKEDYIVYLGRSRLNSNTQGEMKFEVENLILHKDYSADTAAQHNDIALLKIRSKEGRCAQPSRTIQTISLPSMYNDPQFGTSCEITGFGKENSTDLLYPEQLKKTVVKLISHRECQQPHYYGSEVTTKMLCAADPQWKTDSCQGDSGGPLVCSLQGRMTLTGIVSWGRGCALKDKPGVYTRVSHFLPWIRSHTKEENGLAL

SEQ ID NO: 208 - protein, 253 aa, Artificial Sequence
  UROKINASE-TYPE PLASMINOGEN ACTIVATOR (u-PA) protease domain F30Y/R35Q/H37T/V38D/Y40H/V41R/L97bA/H99Q/C122S/Y14 9W/M157K
IIGGEFTTIENQPWYAAIYQRTRGGSDTHRCGGSLISPCWVISATHCFIDYPKKEDYIVYLGRSRLNSNTQGEMKFEVENLILHKDYSADTAAQHNDIALLKIRSKEGRCAQPSRTIQTISLPSMYNDPQFGTSCEITGFGKENSTDWLYPEQLKKTVVKLISHRECQQPHYYGSEVTTKMLCAADPQWKTDSCQGDSGGPLVCSLQGRMTLTGIVSWGRGCALKDKPGVYTRVSHFLPWIRSHTKEENGLAL

SEQ ID NO: 209 - protein, 253 aa, Artificial Sequence
  UROKINASE-TYPE PLASMINOGEN ACTIVATOR (u-PA) protease domain F30Y/R35Q/H37T/V38D/Y40H/V41R/L97bA/H99Q/C122S/Y14 9F/M157K
IIGGEFTTIENQPWYAAIYQRTRGGSDTHRCGGSLISPCWVISATHCFIDYPKKEDYIVYLGRSRLNSNTQGEMKFEVENLILHKDYSADTAAQHNDIALLKIRSKEGRCAQPSRTIQTISLPSMYNDPQFGTSCEITGFGKENSTDFLYPEQLKKTVVKLISHRECQQPHYYGSEVTTKMLCAADPQWKTDSCQGDSGGPLVCSLQGRMTLTGIVSWGRGCALKDKPGVYTRVSHFLPWIRSHTKEENGLAL

SEQ ID NO: 210 - protein, 253 aa, Artificial Sequence
  UROKINASE-TYPE PLASMINOGEN ACTIVATOR (u-PA) protease domain F30Y/R35Q/H37T/V38D/Y40H/V41R/L97bA/H99Q/C122S/M15 7K
IIGGEFTTIENQPWYAAIYQRTRGGSDTHRCGGSLISPCWVISATHCFIDYPKKEDYIVYLGRSRLNSNTQGEMKFEVENLILHKDYSADTAAQHNDIALLKIRSKEGRCAQPSRTIQTISLPSMYNDPQFGTSCEITGFGKENSTDYLYPEQLKKTVVKLISHRECQQPHYYGSEVTTKMLCAADPQWKTDSCQGDSGGPLVCSLQGRMTLTGIVSWGRGCALKDKPGVYTRVSHFLPWIRSHTKEENGLAL

SEQ ID NO: 211 - protein, 253 aa, Artificial Sequence
  UROKINASE-TYPE PLASMINOGEN ACTIVATOR (u-PA) protease domain F30Y/V38D/Y40H/V41R/T56A/L97bA/H99Q/C122S/M157K
IIGGEFTTIENQPWYAAIYRRHRGGSDTHRCGGSLISPCWVISAAHCFIDYPKKEDYIVYLGRSRLNSNTQGEMKFEVENLILHKDYSADTAAQHNDIALLKIRSKEGRCAQPSRTIQTISLPSMYNDPQFGTSCEITGFGKENSTDYLYPEQLKKTVVKLISHRECQQPHYYGSEVTTKMLCAADPQWKTDSCQGDSGGPLVCSLQGRMTLTGIVSWGRGCALKDKPGVYTRVSHFLPWIRSHTKEENGLAL

SEQ ID NO: 212 - protein, 253 aa, Artificial Sequence
  UROKINASE-TYPE PLASMINOGEN ACTIVATOR (u-PA) protease domain F30Y/V38D/Y40H/V41R/L97bA/H99Q/C122S/Y151F/M157K
IIGGEFTTIENQPWYAAIYRRHRGGSDTHRCGGSLISPCWVISATHCFIDYPKKEDYIVYLGRSRLNSNTQGEMKFEVENLILHKDYSADTAAQHNDIALLKIRSKEGRCAQPSRTIQTISLPSMYNDPQFGTSCEITGFGKENSTDYLFPEQLKKTVVKLISHRECQQPHYYGSEVTTKMLCAADPQWKTDSCQGDSGGPLVCSLQGRMTLTGIVSWGRGCALKDKPGVYTRVSHFLPWIRSHTKEENGLAL

SEQ ID NO: 213 - protein, 253 aa, Artificial Sequence
  UROKINASE-TYPE PLASMINOGEN ACTIVATOR (u-PA) protease domain V38D/L97bA/H99Q/C122S/M157K/T158A
IIGGEFTTIENQPWFAAIYRRHRGGSDTYVCGGSLISPCWVISATHCFIDYPKKEDYIVYLGRSRLNSNTQGEMKFEVENLILHKDYSADTAAQHNDIALLKIRSKEGRCAQPSRTIQTISLPSMYNDPQFGTSCEITGFGKENSTDYLYPEQLKKAVVKLISHRECQQPHYYGSEVTTKMLCAADPQWKTDSCQGDSGGPLVCSLQGRMTLTGIVSWGRGCALKDKPGVYTRVSHFLPWIRSHTKEENGLAL

SEQ ID NO: 214 - protein, 253 aa, Artificial Sequence
  UROKINASE-TYPE PLASMINOGEN ACTIVATOR (u-PA) protease domain V38D/V41R/L97bA/H99Q/C122S/M157K/T158A
IIGGEFTTIENQPWFAAIYRRHRGGSDTYRCGGSLISPCWVISATHCFIDYPKKEDYIVYLGRSRLNSNTQGEMKFEVENLILHKDYSADTAAQHNDIALLKIRSKEGRCAQPSRTIQTISLPSMYNDPQFGTSCEITGFGKENSTDYLYPEQLKKAVVKLISHRECQQPHYYGSEVTTKMLCAADPQWKTDSCQGDSGGPLVCSLQGRMTLTGIVSWGRGCALKDKPGVYTRVSHFLPWIRSHTKEENGLAL

SEQ ID NO: 215 - protein, 253 aa, Artificial Sequence
  UROKINASE-TYPE PLASMINOGEN ACTIVATOR (u-PA) protease domain F30Y/R37aH/V38D/Y40Q/V41I/L97bA/H99Q/C122S/Y151L/M 157W/Q192Y
IIGGEFTTIENQPWYAAIYRRHHGGSDTQICGGSLISPCWVISATHCFIDYPKKEDYIVYLGRSRLNSNTQGEMKFEVENLILHKDYSADTAAQHNDIALLKIRSKEGRCAQPSRTIQTISLPSMYNDPQFGTSCEITGFGKENSTDYLLPEQLKWTVVKLISHRECQQPHYYGSEVTTKMLCAADPQWKTDSCYGDSGGPLVCSLQGRMTLTGIVSWGRGCALKDKPGVYTRVSHFLPWIRSHTKEENGLAL

SEQ ID NO: 216 - protein, 253 aa, Artificial Sequence
  UROKINASE-TYPE PLASMINOGEN ACTIVATOR (u-PA) protease domain I17V/F30Y/R35Q/H37W/V38D/Y40H/V41R/Y60bN/L97bA/H99 Q/C122S/Y149H/M157K
IVGGEFTTIENQPWYAAIYQRWRGGSDTHRCGGSLISPCWVISATHCFIDNPKKEDYIVYLGRSRLNSNTQGEMKFEVENLILHKDYSADTAAQHNDIALLKIRSKEGRCAQPSRTIQTISLPSMYNDPQFGTSCEITGFGKENSTDHLYPEQLKKTVVKLISHRECQQPHYYGSEVTTKMLCAADPQWKTDSCQGDSGGPLVCSLQGRMTLTGIVSWGRGCALKDKPGVYTRVSHFLPWIRSHTKEENGLAL

SEQ ID NO: 217 - protein, 253 aa, Artificial Sequence
  UROKINASE-TYPE PLASMINOGEN ACTIVATOR (u-PA) protease domain F30Y/R35Q/H37W/V38D/Y40H/V41R/Y60bN/L97bA/H99Q/C12 2S/Y149H/M157K/T158A
IIGGEFTTIENQPWYAAIYQRWRGGSDTHRCGGSLISPCWVISATHCFIDNPKKEDYIVYLGRSRLNSNTQGEMKFEVENLILHKDYSADTAAQHNDIALLKIRSKEGRCAQPSRTIQTISLPSMYNDPQFGTSCEITGFGKENSTDHLYPEQLKKAVVKLISHRECQQPHYYGSEVTTKMLCAADPQWKTDSCQGDSGGPLVCSLQGRMTLTGIVSWGRGCALKDKPGVYTRVSHFLPWIRSHTKEENGLAL

SEQ ID NO: 218 - protein, 253 aa, Artificial Sequence
  UROKINASE-TYPE PLASMINOGEN ACTIVATOR (u-PA) protease domain I17V/F30Y/R35Q/H37W/V38D/Y40H/V41R/Y60bN/L97bA/H99 Q/C122S/Y149H/M157K/T158A
IVGGEFTTIENQPWYAAIYQRWRGGSDTHRCGGSLISPCWVISATHCFIDNPKKEDYIVYLGRSRLNSNTQGEMKFEVENLILHKDYSADTAAQHNDIALLKIRSKEGRCAQPSRTIQTISLPSMYNDPQFGTSCEITGFGKENSTDHLYPEQLKKAVVKLISHRECQQPHYYGSEVTTKMLCAADPQWKTDSCQGDSGGPLVCSLQGRMTLTGIVSWGRGCALKDKPGVYTRVSHFLPWIRSHTKEENGLAL

SEQ ID NO: 219 - protein, 253 aa, Artificial Sequence
  UROKINASE-TYPE PLASMINOGEN ACTIVATOR (u-PA) protease domain I17V/F30Y/V38D/Y40H/V41R/L97bA/H99Q/C122S/M157K/T1 58A
IVGGEFTTIENQPWYAAIYRRHRGGSDTHRCGGSLISPCWVISATHCFIDYPKKEDYIVYLGRSRLNSNTQGEMKFEVENLILHKDYSADTAAQHNDIALLKIRSKEGRCAQPSRTIQTISLPSMYNDPQFGTSCEITGFGKENSTDYLYPEQLKKAVVKLISHRECQQPHYYGSEVTTKMLCAADPQWKTDSCQGDSGGPLVCSLQGRMTLTGIVSWGRGCALKDKPGVYTRVSHFLPWIRSHTKEENGLAL

SEQ ID NO: 220 - protein, 253 aa, Artificial Sequence
  UROKINASE-TYPE PLASMINOGEN ACTIVATOR (u-PA) protease domain V38D/V41R/L97bA/H99Q/C122S
IIGGEFTTIENQPWFAAIYRRHRGGSDTYRCGGSLISPCWVISATHCFIDYPKKEDYIVYLGRSRLNSNTQGEMKFEVENLILHKDYSADTAAQHNDIALLKIRSKEGRCAQPSRTIQTISLPSMYNDPQFGTSCEITGFGKENSTDYLYPEQLKMTVVKLISHRECQQPHYYGSEVTTKMLCAADPQWKTDSCQGDSGGPLVCSLQGRMTLTGIVSWGRGCALKDKPGVYTRVSHFLPWIRSHTKEENGLAL

SEQ ID NO: 221 - protein, 253 aa, Artificial Sequence
  UROKINASE-TYPE PLASMINOGEN ACTIVATOR (u-PA) protease domain F30Y/R35Q/R36H/H37W/V38E/Y40H/V41R/T97aI/L97bA/H99 Q/C122S/M157K
IIGGEFTTIENQPWYAAIYQHWRGGSETHRCGGSLISPCWVISATHCFIDYPKKEDYIVYLGRSRLNSNTQGEMKFEVENLILHKDYSADIAAQHNDIALLKIRSKEGRCAQPSRTIQTISLPSMYNDPQFGTSCEITGFGKENSTDYLYPEQLKKTVVKLISHRECQQPHYYGSEVTTKMLCAADPQWKTDSCQGDSGGPLVCSLQGRMTLTGIVSWGRGCALKDKPGVYTRVSHFLPWIRSHTKEENGLAL

SEQ ID NO: 222 - protein, 253 aa, Artificial Sequence
  UROKINASE-TYPE PLASMINOGEN ACTIVATOR (u-PA) protease domain I17V/F30Y/R36H/V38E/Y40H/V41R/T97aI/L97bA/H99Q/C12 2S/M157K
IVGGEFTTIENQPWYAAIYRHHRGGSETHRCGGSLISPCWVISATHCFIDYPKKEDYIVYLGRSRLNSNTQGEMKFEVENLILHKDYSADIAAQHNDIALLKIRSKEGRCAQPSRTIQTISLPSMYNDPQFGTSCEITGFGKENSTDYLYPEQLKKTVVKLISHRECQQPHYYGSEVTTKMLCAADPQWKTDSCQGDSGGPLVCSLQGRMTLTGIVSWGRGCALKDKPGVYTRVSHFLPWIRSHTKEENGLAL

SEQ ID NO: 223 - protein, 253 aa, Artificial Sequence
  UROKINASE-TYPE PLASMINOGEN ACTIVATOR (u-PA) protease domain I17V/F30Y/R35Q/R36H/H37W/V38E/Y40H/V41R/T97aI/L97b A/H99Q/C122S/M157K
IVGGEFTTIENQPWYAAIYQHWRGGSETHRCGGSLISPCWVISATHCFIDYPKKEDYIVYLGRSRLNSNTQGEMKFEVENLILHKDYSADIAAQHNDIALLKIRSKEGRCAQPSRTIQTISLPSMYNDPQFGTSCEITGFGKENSTDYLYPEQLKKTVVKLISHRECQQPHYYGSEVTTKMLCAADPQWKTDSCQGDSGGPLVCSLQGRMTLTGIVSWGRGCALKDKPGVYTRVSHFLPWIRSHTKEENGLAL

SEQ ID NO: 224 - protein, 253 aa, Artificial Sequence
  UROKINASE-TYPE PLASMINOGEN ACTIVATOR (u-PA) protease domain F30Y/R36H/V38E/Y40H/V41R/T97aI/L97bA/H99Q/C122S/M1 57K/T158A
IIGGEFTTIENQPWYAAIYRHHRGGSETHRCGGSLISPCWVISATHCFIDYPKKEDYIVYLGRSRLNSNTQGEMKFEVENLILHKDYSADAIAQHNDIALLKIRSKEGRCAQPSRTIQTISLPSMYNDPQFGTSCEITGFGKENSTDYLYPEQLKKAVVKLISHRECQQPHYYGSEVTTKMLCAADPQWKTDSCQGDSGGPLVCSLQGRMTLTGIVSWGRGCALKDKPGVYTRVSHFLPWIRSHTKEENGLAL

SEQ ID NO: 225 - protein, 253 aa, Artificial Sequence
  UROKINASE-TYPE PLASMINOGEN ACTIVATOR (u-PA) protease domain I17V/F30Y/R35Q/R36H/H37W/V38E/Y40H/V41R/T97aI/L97b A/H99Q/C122S/M157K/T158A
IVGGEFTTIENQPWYAAIYQHWRGGSETHRCGGSLISPCWVISATHCFIDYPKKEDYIVYLGRSRLNSNTQGEMKFEVENLILHKDYSADIAAQHNDIALLKIRSKEGRCAQPSRTIQTISLPSMYNDPQFGTSCEITGFGKENSTDYLYPEQLKKAVVKLISHRECQQPHYYGSEVTTKMLCAADPQWKTDSCQGDSGGPLVCSLQGRMTLTGIVSWGRGCALKDKPGVYTRVSHFLPWIRSHTKEENGLAL

SEQ ID NO: 226 - protein, 253 aa, Artificial Sequence
  UROKINASE-TYPE PLASMINOGEN ACTIVATOR (u-PA) protease domain F30Y/R36H/V38E/Y40H/V41R/T97aI/L97bA/H99Q/C122S/Y1 49R/M157K
IIGGEFTTIENQPWYAAIYRHHRGGSETHRCGGSLISPCWVISATHCFIDYPKKEDYIVYLGRSRLNSNTQGEMKFEVENLILHKDYSADAIAQHNDIALLKIRSKEGRCAQPSRTIQTISLPSMYNDPQFGTSCEITGFGKENSTDRLYPEQLKKTVVKLISHRECQQPHYYGSEVTTKMLCAADPQWKTDSCQGDSGGPLVCSLQGRMTLTGIVSWGRGCALKDKPGVYTRVSHFLPWIRSHTKEENGLAL

SEQ ID NO: 227 - protein, 253 aa, Artificial Sequence
  UROKINASE-TYPE PLASMINOGEN ACTIVATOR (u-PA) protease domain I17V/F30Y/V38D/Y40H/V41R/L97bA/H99Q/C122S/Y149R/M1 57K
IVGGEFTTIENQPWYAAIYRRHRGGSDTHRCGGSLISPCWVISATHCFIDYPKKEDYIVYLGRSRLNSNTQGEMKFEVENLILHKDYSADTAAQHNDIALLKIRSKEGRCAQPSRTIQTISLPSMYNDPQFGTSCEITGFGKENSTDRLYPEQLKKTVVKLISHRECQQPHYYGSEVTTKMLCAADPQWKTDSCQGDSGGPLVCSLQGRMTLTGIVSWGRGCALKDKPGVYTRVSHFLPWIRSHTKEENGLAL

SEQ ID NO: 228 - protein, 253 aa, Artificial Sequence
  UROKINASE-TYPE PLASMINOGEN ACTIVATOR (u-PA) protease domain F30Y/R35Q/H37W/V38D/Y40H/V41R/Y60bN/L97bA/H99Q/C12 2S/Y149R/M157K
IIGGEFTTIENQPWYAAIYQRWRGGSDTHRCGGSLISPCWVISATHCFIDNPKKEDYIVYLGRSRLNSNTQGEMKFEVENLILHKDYSADTAAQHNDIALLKIRSKEGRCAQPSRTIQTISLPSMYNDPQFGTSCEITGFGKENSTDRLYPEQLKKTVVKLISHRECQQPHYYGSEVTTKMLCAADPQWKTDSCQGDSGGPLVCSLQGRMTLTGIVSWGRGCALKDKPGVYTRVSHFLPWIRSHTKEENGLAL

SEQ ID NO: 229 - protein, 253 aa, Artificial Sequence
  UROKINASE-TYPE PLASMINOGEN ACTIVATOR (u-PA) protease domain F30Y/V38D/Y40H/V41R/L97bA/H99Q/C122S/Y149R/M157K
IIGGEFTTIENQPWYAAIYRRHRGGSDTHRCGGSLISPCWVISATHCFIDYPKKEDYIVYLGRSRLNSNTQGEMKFEVENLILHKDYSADTAAQHNDIALLKIRSKEGRCAQPSRTIQTISLPSMYNDPQFGTSCEITGFGKENSTDRLYPEQLKKTVVKLISHRECQQPHYYGSEVTTKMLCAADPQWKTDSCQGDSGGPLVCSLQGRMTLTGIVSWGRGCALKDKPGVYTRVSHFLPWIRSHTKEENGLAL

SEQ ID NO: 230 - protein, 253 aa, Artificial Sequence
  UROKINASE-TYPE PLASMINOGEN ACTIVATOR (u-PA) protease domain F30Y/R36H/V38E/Y40H/V41R/K61E/T97aI/L97bA/H99Q/C12 2S/M157K
IIGGEFTTIENQPWYAAIYRHHRGGSETHRCGGSLISPCWVISATHCFIDYPEKEDYIVYLGRSRLNSNTQGEMKFEVENLILHKDYSADIAAQHNDIALLKIRSKEGRCAQPSRTIQTISLPSMYNDPQFGTSCEITGFGKENSTDYLYPEQLKKTVVKLISHRECQQPHYYGSEVTTKMLCAADPQWKTDSCQGDSGGPLVCSLQGRMTLTGIVSWGRGCALKDKPGVYTRVSHFLPWIRSHTKEENGLAL

SEQ ID NO: 231 - protein, 253 aa, Artificial Sequence
  UROKINASE-TYPE PLASMINOGEN ACTIVATOR (u-PA) protease domain F30Y/R36H/R37aH/V38E/Y40H/V41R/K61E/T97aI/L97bA/H9 9Q/C122S/M157K
IIGGEFTTIENQPWYAAIYRHHHGGSETHRCGGSLISPCWVISATHCFIDYPEKEDYIVYLGRSRLNSNTQGEMKFEVENLILHKDYSADIAAQHNDIALLKIRSKEGRCAQPSRTIQTISLPSMYNDPQFGTSCEITGFGKENSTDYLYPEQLKKTVVKLISHRECQQPHYYGSEVTTKMLCAADPQWKTDSCQGDSGGPLVCSLQGRMTLTGIVSWGRGCALKDKPGVYTRVSHFLPWIRSHTKEENGLAL

SEQ ID NO: 232 - protein, 253 aa, Artificial Sequence
  UROKINASE-TYPE PLASMINOGEN ACTIVATOR (u-PA) protease domain F30Y/R36H/V38E/Y40H/V41R/K61E/T97aI/L97bA/H99Q/C12 2S/Y149R/M157K
IIGGEFTTIENQPWYAAIYRHHRGGSETHRCGGSLISPCWVISATHCFIDYPEKEDYIVYLGRSRLNSNTQGEMKFEVENLILHKDYSADIAAQHNDIALLKIRSKEGRCAQPSRTIQTISLPSMYNDPQFGTSCEITGFGKENSTDRLYPEQLKKTVVKLISHRECQQPHYYGSEVTTKMLCAADPQWKTDSCQGDSGGPLVCSLQGRMTLTGIVSWGRGCALKDKPGVYTRVSHFLPWIRSHTKEENGLAL

SEQ ID NO: 233 - protein, 253 aa, Artificial Sequence
  UROKINASE-TYPE PLASMINOGEN ACTIVATOR (u-PA) protease domain F30Y/R36H/R37aH/V38E/Y40H/V41R/K61E/T97aI/L97bA/H9 9Q/C122S/Y149R/M157K
IIGGEFTTIENQPWYAAIYRHHHGGSETHRCGGSLISPCWVISATHCFIDYPEKEDYIVYLGRSRLNSNTQGEMKFEVENLILHKDYSADIAAQHNDIALLKIRSKEGRCAQPSRTIQTISLPSMYNDPQFGTSCEITGFGKENSTDRLYPEQLKKTVVKLISHRECQQPHYYGSEVTTKMLCAADPQWKTDSCQGDSGGPLVCSLQGRMTLTGIVSWGRGCALKDKPGVYTRVSHFLPWIRSHTKEENGLAL

SEQ ID NO: 234 - protein, 253 aa, Artificial Sequence
  UROKINASE-TYPE PLASMINOGEN ACTIVATOR (u-PA) protease domain F30Y/R35Q/H37D/V38D/Y40H/V41R/D60aE/Y60bN/L97bA/H9 9Q/C122S/Y149S/M157K
IIGGEFTTIENQPWYAAIYQRDRGGSDTHRCGGSLISPCWVISATHCFIENPKKEDYIVYLGRSRLNSNTQGEMKFEVENLILHKDYSADTAAQHNDIALLKIRSKEGRCAQPSRTIQTISLPSMYNDPQFGTSCEITGFGKENSTDSLYPEQLKKTVVKLISHRECQQPHYYGSEVTTKMLCAADPQWKTDSCQGDSGGPLVCSLQGRMTLTGIVSWGRGCALKDKPGVYTRVSHFLPWIRSHTKEENGLAL

SEQ ID NO: 235 - protein, 253 aa, Artificial Sequence
  UROKINASE-TYPE PLASMINOGEN ACTIVATOR (u-PA) protease domain F30Y/R35Q/H37T/V38D/Y40H/V41R/D60aE/Y60bN/L97bA/H9 9Q/C122S/Y149L/M157K
IIGGEFTTIENQPWYAAIYQRTRGGSDTHRCGGSLISPCWVISATHCFIENPKKEDYIVYLGRSRLNSNTQGEMKFEVENLILHKDYSADTAAQHNDIALLKIRSKEGRCAQPSRTIQTISLPSMYNDPQFGTSCEITGFGKENSTDLLYPEQLKKTVVKLISHRECQQPHYYGSEVTTKMLCAADPQWKTDSCQGDSGGPLVCSLQGRMTLTGIVSWGRGCALKDKPGVYTRVSHFLPWIRSHTKEENGLAL

SEQ ID NO: 236 - protein, 253 aa, Artificial Sequence
  UROKINASE-TYPE PLASMINOGEN ACTIVATOR (u-PA) protease domain F30Y/R35Q/V38D/Y40H/V41R/Y60bE/L97bA/H99Q/C122S/Y1 49Q/M157K/R217S
IIGGEFTTIENQPWYAAIYQRHRGGSDTHRCGGSLISPCWVISATHCFIDEPKKEDYIVYLGRSRLNSNTQGEMKFEVENLILHKDYSADTAAQHNDIALLKIRSKEGRCAQPSRTIQTISLPSMYNDPQFGTSCEITGFGKENSTDQLYPEQLKKTVVKLISHRECQQPHYYGSEVTTKMLCAADPQWKTDSCQGDSGGPLVCSLQGRMTLTGIVSWGSGCALKDKPGVYTRVSHFLPWIRSHTKEENGLAL

SEQ ID NO: 237 - protein, 253 aa, Artificial Sequence
  UROKINASE-TYPE PLASMINOGEN ACTIVATOR (u-PA) protease domain F30Y/R35Q/V38Y/Y40H/V41R/D60aE/Y60bE/L97bA/H99Q/C1 22S/Y149V/M157K/R217M
IIGGEFTTIENQPWYAAIYQRHRGGSYTHRCGGSLISPCWVISATHCFIEEPKKEDYIVYLGRSRLNSNTQGEMKFEVENLILHKDYSADTAAQHNDIALLKIRSKEGRCAQPSRTIQTISLPSMYNDPQFGTSCEITGFGKENSTDVLYPEQLKKTVVKLISHRECQQPHYYGSEVTTKMLCAADPQWKTDSCQGDSGGPLVCSLQGRMTLTGIVSWGMGCALKDKPGVYTRVSHFLPWIRSHTKEENGLAL

SEQ ID NO: 238 - protein, 253 aa, Artificial Sequence
  UROKINASE-TYPE PLASMINOGEN ACTIVATOR (u-PA) protease domain F30Y/R35Q/V38D/Y40H/V41R/D60aE/Y60bS/L97bA/H99Q/C1 22S/Y149T/M157K
IIGGEFTTIENQPWYAAIYQRHRGGSDTHRCGGSLISPCWVISATHCFIESPKKEDYIVYLGRSRLNSNTQGEMKFEVENLILHKDYSADTAAQHNDIALLKIRSKEGRCAQPSRTIQTISLPSMYNDPQFGTSCEITGFGKENSTDTLYPEQLKKTVVKLISHRECQQPHYYGSEVTTKMLCAADPQWKTDSCQGDSGGPLVCSLQGRMTLTGIVSWGRGCALKDKPGVYTRVSHFLPWIRSHTKEENGLAL

SEQ ID NO: 239 - protein, 253 aa, Artificial Sequence
  UROKINASE-TYPE PLASMINOGEN ACTIVATOR (u-PA) protease domain F30Y/R35Q/V38D/Y40H/V41R/D60aE/Y60bE/L97bA/H99Q/C1 22S/Y149L/M157K/R217S
IIGGEFTTIENQPWYAAIYQRHRGGSDTHRCGGSLISPCWVISATHCFIEEPKKEDYIVYLGRSRLNSNTQGEMKFEVENLILHKDYSADTAAQHNDIALLKIRSKEGRCAQPSRTIQTISLPSMYNDPQFGTSCEITGFGKENSTDLLYPEQLKKTVVKLISHRECQQPHYYGSEVTTKMLCAADPQWKTDSCQGDSGGPLVCSLQGRMTLTGIVSWGSGCALKDKPGVYTRVSHFLPWIRSHTKEENGLAL

SEQ ID NO: 240 - protein, 253 aa, Artificial Sequence
  UROKINASE-TYPE PLASMINOGEN ACTIVATOR (u-PA) protease domain F30Y/R35Q/H37Y/V38D/Y40H/V41R/Y60bE/L97bA/H99Q/C12 2S/Y149R/M157K
IIGGEFTTIENQPWYAAIYQRYRGGSDTHRCGGSLISPCWVISATHCFIDEPKKEDYIVYLGRSRLNSNTQGEMKFEVENLILHKDYSADTAAQHNDIALLKIRSKEGRCAQPSRTIQTISLPSMYNDPQFGTSCEITGFGKENSTDRLYPEQLKKTVVKLISHRECQQPHYYGSEVTTKMLCAADPQWKTDSCQGDSGGPLVCSLQGRMTLTGIVSWGRGCALKDKPGVYTRVSHFLPWIRSHTKEENGLAL

SEQ ID NO: 241 - protein, 253 aa, Artificial Sequence
  UROKINASE-TYPE PLASMINOGEN ACTIVATOR (u-PA) protease domain F30Y/V38D/Y40H/V41R/L97bA/H99Q/C122S/M157K/Q192H
IIGGEFTTIENQPWYAAIYRRHRGGSDTHRCGGSLISPCWVISATHCFIDYPKKEDYIVYLGRSRLNSNTQGEMKFEVENLILHKDYSADTAAQHNDIALLKIRSKEGRCAQPSRTIQTISLPSMYNDPQFGTSCEITGFGKENSTDYLYPEQLKKTVVKLISHRECQQPHYYGSEVTTKMLCAADPQWKTDSCHGDSGGPLVCSLQGRMTLTGIVSWGRGCALKDKPGVYTRVSHFLPWIRSHTKEENGLAL

SEQ ID NO: 242 - protein, 253 aa, Artificial Sequence
  UROKINASE-TYPE PLASMINOGEN ACTIVATOR (u-PA) protease domain F30Y/R36H/V38E/Y40H/V41R/I65T/T97aI/L97bA/H99Q/C12 2S/M157K
IIGGEFTTIENQPWYAAIYRHHRGGSETHRCGGSLISPCWVISATHCFIDYPKKEDYTVYLGRSRLNSNTQGEMKFEVENLILHKDYSADIAAQHNDIALLKIRSKEGRCAQPSRTIQTISLPSMYNDPQFGTSCEITGFGKENSTDYLYPEQLKKTVVKLISHRECQQPHYYGSEVTTKMLCAADPQWKTDSCQGDSGGPLVCSLQGRMTLTGIVSWGRGCALKDKPGVYTRVSHFLPWIRSHTKEENGLAL

SEQ ID NO: 243 - protein, 253 aa, Artificial Sequence
  UROKINASE-TYPE PLASMINOGEN ACTIVATOR (u-PA) protease domain F30Y/R36H/V38E/Y40L/V41R/T97aI/L97bA/H99Q/C122S/M1 57K
IIGGEFTTIENQPWYAAIYRHHRGGSETLRCGGSLISPCWVISATHCFIDYPKKEDYIVYLGRSRLNSNTQGEMKFEVENLILHKDYSADIAAQHNDIALLKIRSKEGRCAQPSRTIQTISLPSMYNDPQFGTSCEITGFGKENSTDYLYPEQLKKTVVKLISHRECQQPHYYGSEVTTKMLCAADPQWKTDSCQGDSGGPLVCSLQGRMTLTGIVSWGRGCALKDKPGVYTRVSHFLPWIRSHTKEENGLAL

SEQ ID NO: 244 - protein, 253 aa, Artificial Sequence
  UROKINASE-TYPE PLASMINOGEN ACTIVATOR (u-PA) protease domain F30Y/R36H/V38E/Y40H/V41R/T97aI/L97bA/H99Q/C122S/M1 57K/Q192H
IIGGEFTTIENQPWYAAIYRHHRGGSETHRCGGSLISPCWVISATHCFIDYPKKEDYIVYLGRSRLNSNTQGEMKFEVENLILHKDYSADIAAQHNDIALLKIRSKEGRCAQPSRTIQTISLPSMYNDPQFGTSCEITGFGKENSTDYLYPEQLKKTVVKLISHRECQQPHYYGSEVTTKMLCAADPQWKTDSCHGDSGGPLVCSLQGRMTLTGIVSWGRGCALKDKPGVYTRVSHFLPWIRSHTKEENGLAL

SEQ ID NO: 245 - protein, 253 aa, Artificial Sequence
  UROKINASE-TYPE PLASMINOGEN ACTIVATOR (u-PA) protease domain N26D/F30Y/R36H/R37aH/V38E/Y40H/V41R/K61E/I65T/L97b A/H99Q/C122S/M126I/M157K
IIGGEFTTIEDQPWYAAIYRHHHGGSETHRCGGSLISPCWVISATHCFIDYPEKEDYTVYLGRSRLNSNTQGEMKFEVENLILHKDYSADTAAQHNDIALLKIRSKEGRCAQPSRTIQTISLPSIYNDPQFGTSCEITGFGKENSTDYLYPEQLKKTVVKLISHRECQQPHYYGSEVTTKMLCAADPQWKTDSCQGDSGGPLVCSLQGRMTLTGIVSWGRGCALKDKPGVYTRVSHFLPWIRSHTKEENGLAL

SEQ ID NO: 246 - protein, 253 aa, Artificial Sequence
  UROKINASE-TYPE PLASMINOGEN ACTIVATOR (u-PA) protease domain N26D/F30Y/V38D/Y40H/V41R/I65T/L97bA/H99Q/C122S/M12 6I/M157K/Q192H
IIGGEFTTIEDQPWYAAIYRRHRGGSDTHRCGGSLISPCWVISATHCFIDYPKKEDYTVYLGRSRLNSNTQGEMKFEVENLILHKDYSADTAAQHNDIALLKIRSKEGRCAQPSRTIQTISLPSIYNDPQFGTSCEITGFGKENSTDYLYPEQLKKTVVKLISHRECQQPHYYGSEVTTKMLCAADPQWKTDSCHGDSGGPLVCSLQGRMTLTGIVSWGRGCALKDKPGVYTRVSHFLPWIRSHTKEENGLAL

SEQ ID NO: 247 - protein, 253 aa, Artificial Sequence
  UROKINASE-TYPE PLASMINOGEN ACTIVATOR (u-PA) protease domain N26D/F30Y/V38D/Y40L/V41R/I65T/L97bA/H99Q/C122S/M12 6I/M157K
IIGGEFTTIEDQPWYAAIYRRHRGGSDTLRCGGSLISPCWVISATHCFIDYPKKEDYTVYLGRSRLNSNTQGEMKFEVENLILHKDYSADTAAQHNDIALLKIRSKEGRCAQPSRTIQTISLPSIYNDPQFGTSCEITGFGKENSTDYLYPEQLKKTVVKLISHRECQQPHYYGSEVTTKMLCAADPQWKTDSCQGDSGGPLVCSLQGRMTLTGIVSWGRGCALKDKPGVYTRVSHFLPWIRSHTKEENGLAL

SEQ ID NO: 248 - protein, 253 aa, Artificial Sequence
  UROKINASE-TYPE PLASMINOGEN ACTIVATOR (u-PA) protease domain N26D/F30Y/V38D/Y40H/V41R/I65T/L97bA/H99Q/C122S/M12 6I/Y149R/M157K
IIGGEFTTIEDQPWYAAIYRRHRGGSDTHRCGGSLISPCWVISATHCFIDYPKKEDYTVYLGRSRLNSNTQGEMKFEVENLILHKDYSADTAAQHNDIALLKIRSKEGRCAQPSRTIQTISLPSIYNDPQFGTSCEITGFGKENSTDRLYPEQLKKTVVKLISHRECQQPHYYGSEVTTKMLCAADPQWKTDSCQGDSGGPLVCSLQGRMTLTGIVSWGRGCALKDKPGVYTRVSHFLPWIRSHTKEENGLAL

SEQ ID NO: 249 - protein, 253 aa, Artificial Sequence
  UROKINASE-TYPE PLASMINOGEN ACTIVATOR (u-PA) protease domain F30Y/R36H/V38E/Y40H/V41R/I65T/T97aI/L97bA/H99Q/C12 2S/Y149R/M157K
IIGGEFTTIENQPWYAAIYRHHRGGSETHRCGGSLISPCWVISATHCFIDYPKKEDYTVYLGRSRLNSNTQGEMKFEVENLILHKDYSADIAAQHNDIALLKIRSKEGRCAQPSRTIQTISLPSMYNDPQFGTSCEITGFGKENSTDRLYPEQLKKTVVKLISHRECQQPHYYGSEVTTKMLCAADPQWKTDSCQGDSGGPLVCSLQGRMTLTGIVSWGRGCALKDKPGVYTRVSHFLPWIRSHTKEENGLAL

SEQ ID NO: 250 - protein, 253 aa, Artificial Sequence
  UROKINASE-TYPE PLASMINOGEN ACTIVATOR (u-PA) protease domain F30Y/V38D/Y40L/V41R/L97bA/H99Q/C122S/M157K
IIGGEFTTIENQPWYAAIYRRHRGGSDTLRCGGSLISPCWVISATHCFIDYPKKEDYIVYLGRSRLNSNTQGEMKFEVENLILHKDYSADTAAQHNDIALLKIRSKEGRCAQPSRTIQTISLPSMYNDPQFGTSCEITGFGKENSTDYLYPEQLKKTVVKLISHRECQQPHYYGSEVTTKMLCAADPQWKTDSCQGDSGGPLVCSLQGRMTLTGIVSWGRGCALKDKPGVYTRVSHFLPWIRSHTKEENGLAL

SEQ ID NO: 251 - protein, 253 aa, Artificial Sequence
  UROKINASE-TYPE PLASMINOGEN ACTIVATOR (u-PA) protease domain F30Y/V38D/Y40L/V41R/L97bA/H99Q/C122S/M157K/Q192H
IIGGEFTTIENQPWYAAIYRRHRGGSDTLRCGGSLISPCWVISATHCFIDYPKKEDYIVYLGRSRLNSNTQGEMKFEVENLILHKDYSADTAAQHNDIALLKIRSKEGRCAQPSRTIQTISLPSMYNDPQFGTSCEITGFGKENSTDYLYPEQLKKTVVKLISHRECQQPHYYGSEVTTKMLCAADPQWKTDSCHGDSGGPLVCSLQGRMTLTGIVSWGRGCALKDKPGVYTRVSHFLPWIRSHTKEENGLAL

SEQ ID NO: 252 - protein, 253 aa, Artificial Sequence
  UROKINASE-TYPE PLASMINOGEN ACTIVATOR (u-PA) protease domain F30Y/R36H/V38E/Y40L/V41R/T97aI/L97bA/H99Q/C122S/M1 57K/Q192H
IIGGEFTTIENQPWYAAIYRHHRGGSETLRCGGSLISPCWVISATHCFIDYPKKEDYIVYLGRSRLNSNTQGEMKFEVENLILHKDYSADIAAQHNDIALLKIRSKEGRCAQPSRTIQTISLPSMYNDPQFGTSCEITGFGKENSTDYLYPEQLKKTVVKLISHRECQQPHYYGSEVTTKMLCAADPQWKTDSCHGDSGGPLVCSLQGRMTLTGIVSWGRGCALKDKPGVYTRVSHFLPWIRSHTKEENGLAL

SEQ ID NO: 253 - protein, 253 aa, Artificial Sequence
  UROKINASE-TYPE PLASMINOGEN ACTIVATOR (u-PA) protease domain F30Y/R35W/R36H/H37E/V38E/T39S/Y40H/V41W/Y60bW/T97a I/L97bA/H99Q/C122S/Y149R/M157K/Q192Y
IIGGEFTTIENQPWYAAIYWHERGGSESHWCGGSLISPCWVISATHCFIDWPKKEDYIVYLGRSRLNSNTQGEMKFEVENLILHKDYSADIAAQHNDIALLKIRSKEGRCAQPSRTIQTISLPSMYNDPQFGTSCEITGFGKENSTDRLYPEQLKKTVVKLISHRECQQPHYYGSEVTTKMLCAADPQWKTDSCYGDSGGPLVCSLQGRMTLTGIVSWGRGCALKDKPGVYTRVSHFLPWIRSHTKEENGLAL

SEQ ID NO: 254 - protein, 253 aa, Artificial Sequence
  UROKINASE-TYPE PLASMINOGEN ACTIVATOR (u-PA) protease domain F30Y/R35W/R36H/H37E/V38E/T39W/Y40H/V41R/Y60bH/T97a I/L97bA/H99Q/C122S/Y149R/M157K/Q192A
IIGGEFTTIENQPWYAAIYWHERGGSEWHRCGGSLISPCWVISATHCFIDHPKKEDYIVYLGRSRLNSNTQGEMKFEVENLILHKDYSADIAAQHNDIALLKIRSKEGRCAQPSRTIQTISLPSMYNDPQFGTSCEITGFGKENSTDRLYPEQLKKTVVKLISHRECQQPHYYGSEVTTKMLCAADPQWKTDSCAGDSGGPLVCSLQGRMTLTGIVSWGRGCALKDKPGVYTRVSHFLPWIRSHTKEENGLAL

SEQ ID NO: 255 - protein, 253 aa, Artificial Sequence
  UROKINASE-TYPE PLASMINOGEN ACTIVATOR (u-PA) protease domain F30Y/R35W/R36H/H37E/V38E/T39Q/Y40H/V41W/Y60bW/T97a I/L97bA/H99Q/C122S/Y149R/M157K/Q192F
IIGGEFTTIENQPWYAAIYWHERGGSEQHWCGGSLISPCWVISATHCFIDWPKKEDYIVYLGRSRLNSNTQGEMKFEVENLILHKDYSADIAAQHNDIALLKIRSKEGRCAQPSRTIQTISLPSMYNDPQFGTSCEITGFGKENSTDRLYPEQLKKTVVKLISHRECQQPHYYGSEVTTKMLCAADPQWKTDSCFGDSGGPLVCSLQGRMTLTGIVSWGRGCALKDKPGVYTRVSHFLPWIRSHTKEENGLAL

SEQ ID NO: 256 - protein, 253 aa, Artificial Sequence
  UROKINASE-TYPE PLASMINOGEN ACTIVATOR (u-PA) protease domain F30Y/R35W/R36H/H37E/V38E/T39R/Y40H/V41W/Y60bW/T97a I/L97bA/H99Q/C122S/Y149R/M157K/Q192Y
IIGGEFTTIENQPWYAAIYWHERGGSERHWCGGSLISPCWVISATHCFIDWPKKEDYIVYLGRSRLNSNTQGEMKFEVENLILHKDYSADIAAQHNDIALLKIRSKEGRCAQPSRTIQTISLPSMYNDPQFGTSCEITGFGKENSTDRLYPEQLKKTVVKLISHRECQQPHYYGSEVTTKMLCAADPQWKTDSCYGDSGGPLVCSLQGRMTLTGIVSWGRGCALKDKPGVYTRVSHFLPWIRSHTKEENGLAL

SEQ ID NO: 257 - protein, 253 aa, Artificial Sequence
  UROKINASE-TYPE PLASMINOGEN ACTIVATOR (u-PA) protease domain F30Y/R35Y/R36H/H37E/V38E/T39S/Y40H/V41W/Y60bW/T97a I/L97bA/H99Q/C122S/Y149R/M157K/Q192F
IIGGEFTTIENQPWYAAIYYHERGGSESHWCGGSLISPCWVISATHCFIDWPKKEDYIVYLGRSRLNSNTQGEMKFEVENLILHKDYSADIAAQHNDIALLKIRSKEGRCAQPSRTIQTISLPSMYNDPQFGTSCEITGFGKENSTDRLYPEQLKKTVVKLISHRECQQPHYYGSEVTTKMLCAADPQWKTDSCFGDSGGPLVCSLQGRMTLTGIVSWGRGCALKDKPGVYTRVSHFLPWIRSHTKEENGLAL

SEQ ID NO: 258 - protein, 253 aa, Artificial Sequence
  UROKINASE-TYPE PLASMINOGEN ACTIVATOR (u-PA) protease domain F30Y/R35Y/R36H/H37E/V38E/T39R/Y40H/V41W/Y60bW/T97a I/L97bA/H99Q/C122S/Y149R/M157K/Q192H
IIGGEFTTIENQPWYAAIYYHERGGSERHWCGGSLISPCWVISATHCFIDWPKKEDYIVYLGRSRLNSNTQGEMKFEVENLILHKDYSADIAAQHNDIALLKIRSKEGRCAQPSRTIQTISLPSMYNDPQFGTSCEITGFGKENSTDRLYPEQLKKTVVKLISHRECQQPHYYGSEVTTKMLCAADPQWKTDSCHGDSGGPLVCSLQGRMTLTGIVSWGRGCALKDKPGVYTRVSHFLPWIRSHTKEENGLAL

SEQ ID NO: 259 - protein, 253 aa, Artificial Sequence
  UROKINASE-TYPE PLASMINOGEN ACTIVATOR (u-PA) protease domain F30Y/R35Y/R36H/H37E/V38E/T39R/Y40H/V41W/Y60bW/T97a I/L97bA/H99Q/C122S/Y149R/M157K/Q192F
IIGGEFTTIENQPWYAAIYYHERGGSERHWCGGSLISPCWVISATHCFIDWPKKEDYIVYLGRSRLNSNTQGEMKFEVENLILHKDYSADIAAQHNDIALLKIRSKEGRCAQPSRTIQTISLPSMYNDPQFGTSCEITGFGKENSTDRLYPEQLKKTVVKLISHRECQQPHYYGSEVTTKMLCAADPQWKTDSCFGDSGGPLVCSLQGRMTLTGIVSWGRGCALKDKPGVYTRVSHFLPWIRSHTKEENGLAL

SEQ ID NO: 260 - protein, 253 aa, Artificial Sequence
  UROKINASE-TYPE PLASMINOGEN ACTIVATOR (u-PA) protease domain I17V/F30Y/R35W/R36H/H37E/V38E/T39W/Y40H/V41R/Y60bQ /T97aE/L97bA/H99Q/C122S/Y149K/M157K
IVGGEFTTIENQPWYAAIYWHERGGSEWHRCGGSLISPCWVISATHCFIDQPKKEDYIVYLGRSRLNSNTQGEMKFEVENLILHKDYSADEAAQHNDIALLKIRSKEGRCAQPSRTIQTISLPSMYNDPQFGTSCEITGFGKENSTDKLYPEQLKKTVVKLISHRECQQPHYYGSEVTTKMLCAADPQWKTDSCQGDSGGPLVCSLQGRMTLTGIVSWGRGCALKDKPGVYTRVSHFLPWIRSHTKEENGLAL

SEQ ID NO: 261 - protein, 253 aa, Artificial Sequence
  UROKINASE-TYPE PLASMINOGEN ACTIVATOR (u-PA) protease domain F30Y/R35W/R36Q/H37E/V38A/T39W/Y40H/V41R/Y60bQ/K61D /I65V/T97aE/L97bA/H99Q/C122S/Y149K/M157K
IIGGEFTTIENQPWYAAIYWQERGGSAWHRCGGSLISPCWVISATHCFIDQPDKEDYVVYLGRSRLNSNTQGEMKFEVENLILHKDYSADEAAQHNDIALLKIRSKEGRCAQPSRTIQTISLPSMYNDPQFGTSCEITGFGKENSTDKLYPEQLKKTVVKLISHRECQQPHYYGSEVTTKMLCAADPQWKTDSCQGDSGGPLVCSLQGRMTLTGIVSWGRGCALKDKPGVYTRVSHFLPWIRSHTKEENGLAL

SEQ ID NO: 262 - protein, 253 aa, Artificial Sequence
  UROKINASE-TYPE PLASMINOGEN ACTIVATOR (u-PA) protease domain F30Y/R35W/R36Q/H37E/V38E/T39W/Y40H/V41R/Y60bQ/K61L /I65V/T97aE/L97bA/H99Q/C122S/Y149K/M157K
IIGGEFTTIENQPWYAAIYWQERGGSEWHRCGGSLISPCWVISATHCFIDQPLKEDYVVYLGRSRLNSNTQGEMKFEVENLILHKDYSADEAAQHNDIALLKIRSKEGRCAQPSRTIQTISLPSMYNDPQFGTSCEITGFGKENSTDKLYPEQLKKTVVKLISHRECQQPHYYGSEVTTKMLCAADPQWKTDSCQGDSGGPLVCSLQGRMTLTGIVSWGRGCALKDKPGVYTRVSHFLPWIRSHTKEENGLAL

SEQ ID NO: 263 - protein, 253 aa, Artificial Sequence
  UROKINASE-TYPE PLASMINOGEN ACTIVATOR (u-PA) protease domain F30Y/R35W/R36A/H37E/V38E/T39W/Y40H/V41R/Y60bQ/K61D /I65R/T97aE/L97bA/H99Q/C122S/Y149K/M157K
IIGGEFTTIENQPWYAAIYWAERGGSEWHRCGGSLISPCWVISATHCFIDQPDKEDYRVYLGRSRLNSNTQGEMKFEVENLILHKDYSADEAAQHNDIALLKIRSKEGRCAQPSRTIQTISLPSMYNDPQFGTSCEITGFGKENSTDKLYPEQLKKTVVKLISHRECQQPHYYGSEVTTKMLCAADPQWKTDSCQGDSGGPLVCSLQGRMTLTGIVSWGRGCALKDKPGVYTRVSHFLPWIRSHTKEENGLAL

SEQ ID NO: 264 - protein, 253 aa, Artificial Sequence
  UROKINASE-TYPE PLASMINOGEN ACTIVATOR (u-PA) protease domain F30Y/R35W/R36K/H37E/V38E/T39W/Y40H/V41R/Y60bQ/K61E /I65T/T97aE/L97bA/H99Q/C122S/Y149K/M157K
IIGGEFTTIENQPWYAAIYWKERGGSEWHRCGGSLISPCWVISATHCFIDQPEKEDYTVYLGRSRLNSNTQGEMKFEVENLILHKDYSADEAAQHNDIALLKIRSKEGRCAQPSRTIQTISLPSMYNDPQFGTSCEITGFGKENSTDKLYPEQLKKTVVKLISHRECQQPHYYGSEVTTKMLCAADPQWKTDSCQGDSGGPLVCSLQGRMTLTGIVSWGRGCALKDKPGVYTRVSHFLPWIRSHTKEENGLAL

SEQ ID NO: 265 - protein, 253 aa, Artificial Sequence
  UROKINASE-TYPE PLASMINOGEN ACTIVATOR (u-PA) protease domain F30Y/R35W/R36H/H37E/V38E/T39Y/Y40F/V41R/Y60bQ/T97a E/L97bA/H99Q/C122S/Y149R/M157K
IIGGEFTTIENQPWYAAIYWHERGGSEYFRCGGSLISPCWVISATHCFIDQPKKEDYIVYLGRSRLNSNTQGEMKFEVENLILHKDYSADEAAQHNDIALLKIRSKEGRCAQPSRTIQTISLPSMYNDPQFGTSCEITGFGKENSTDRLYPEQLKKTVVKLISHRECQQPHYYGSEVTTKMLCAADPQWKTDSCQGDSGGPLVCSLQGRMTLTGIVSWGRGCALKDKPGVYTRVSHFLPWIRSHTKEENGLAL

SEQ ID NO: 266 - protein, 253 aa, Artificial Sequence
  UROKINASE-TYPE PLASMINOGEN ACTIVATOR (u-PA) protease domain F30Y/R35W/R36H/H37E/V38E/T39W/Y40H/V41R/Y60bQ/T97a E/L97bA/H99Q/C122S/Y149K/M157K/Q192P
IIGGEFTTIENQPWYAAIYWHERGGSEWHRCGGSLISPCWVISATHCFIDQPKKEDYIVYLGRSRLNSNTQGEMKFEVENLILHKDYSADEAAQHNDIALLKIRSKEGRCAQPSRTIQTISLPSMYNDPQFGTSCEITGFGKENSTDKLYPEQLKKTVVKLISHRECQQPHYYGSEVTTKMLCAADPQWKTDSCPGDSGGPLVCSLQGRMTLTGIVSWGRGCALKDKPGVYTRVSHFLPWIRSHTKEENGLAL

SEQ ID NO: 267 - protein, 253 aa, Artificial Sequence
  UROKINASE-TYPE PLASMINOGEN ACTIVATOR (u-PA) protease domain V38E/Y40Q/V41Q/D60aP/Y60bL/L97bA/H99Q/C122S/Y149W
IIGGEFTTIENQPWFAAIYRRHRGGSETQQCGGSLISPCWVISATHCFIPLPKKEDYIVYLGRSRLNSNTQGEMKFEVENLILHKDYSADTAAQHNDIALLKIRSKEGRCAQPSRTIQTISLPSMYNDPQFGTSCEITGFGKENSTDWLYPEQLKMTVVKLISHRECQQPHYYGSEVTTKMLCAADPQWKTDSCQGDSGGPLVCSLQGRMTLTGIVSWGRGCALKDKPGVYTRVSHFLPWIRSHTKEENGLAL

SEQ ID NO: 268 - protein, 253 aa, Artificial Sequence
  UROKINASE-TYPE PLASMINOGEN ACTIVATOR (u-PA) protease domain V38E/Y40Q/V41L/D60aP/Y60bL/L97bA/H99Q/C122S/Y149W
IIGGEFTTIENQPWFAAIYRRHRGGSETQLCGGSLISPCWVISATHCFIPLPKKEDYIVYLGRSRLNSNTQGEMKFEVENLILHKDYSADTAAQHNDIALLKIRSKEGRCAQPSRTIQTISLPSMYNDPQFGTSCEITGFGKENSTDWLYPEQLKMTVVKLISHRECQQPHYYGSEVTTKMLCAADPQWKTDSCQGDSGGPLVCSLQGRMTLTGIVSWGRGCALKDKPGVYTRVSHFLPWIRSHTKEENGLAL

SEQ ID NO: 269 - protein, 253 aa, Artificial Sequence
  UROKINASE-TYPE PLASMINOGEN ACTIVATOR (u-PA) protease domain F30Y/R35W/R36H/H37E/V38E/T39W/Y40H/V41R/Y60bQ/T97a E/L97bA/H99L/C122S/Y149K/M157K
IIGGEFTTIENQPWYAAIYWHERGGSEWHRCGGSLISPCWVISATHCFIDQPKKEDYIVYLGRSRLNSNTQGEMKFEVENLILHKDYSADEAALHNDIALLKIRSKEGRCAQPSRTIQTISLPSMYNDPQFGTSCEITGFGKENSTDKLYPEQLKKTVVKLISHRECQQPHYYGSEVTTKMLCAADPQWKTDSCQGDSGGPLVCSLQGRMTLTGIVSWGRGCALKDKPGVYTRVSHFLPWIRSHTKEENGLAL

SEQ ID NO: 270 - protein, 253 aa, Artificial Sequence
  UROKINASE-TYPE PLASMINOGEN ACTIVATOR (u-PA) protease domain F30Y/R36H/V38E/Y40H/V41R/T97aE/L97bA/H99Q/C122S/M1 57K
IIGGEFTTIENQPWYAAIYRHHRGGSETHRCGGSLISPCWVISATHCFIDYPKKEDYIVYLGRSRLNSNTQGEMKFEVENLILHKDYSADEAAQHNDIALLKIRSKEGRCAQPSRTIQTISLPSMYNDPQFGTSCEITGFGKENSTDYLYPEQLKKTVVKLISHRECQQPHYYGSEVTTKMLCAADPQWKTDSCQGDSGGPLVCSLQGRMTLTGIVSWGRGCALKDKPGVYTRVSHFLPWIRSHTKEENGLAL

SEQ ID NO: 271 - protein, 253 aa, Artificial Sequence
  UROKINASE-TYPE PLASMINOGEN ACTIVATOR (u-PA) protease domain R35Y/R36H/H37K/V38E/T39F/V41R/T97aI/L97bA/H99Q/C12 2S/Y149R/M157K
IIGGEFTTIENQPWFAAIYYHKRGGSEFYRCGGSLISPCWVISATHCFIDYPKKEDYIVYLGRSRLNSNTQGEMKFEVENLILHKDYSADIAAQHNDIALLKIRSKEGRCAQPSRTIQTISLPSMYNDPQFGTSCEITGFGKENSTDRLYPEQLKKTVVKLISHRECQQPHYYGSEVTTKMLCAADPQWKTDSCQGDSGGPLVCSLQGRMTLTGIVSWGRGCALKDKPGVYTRVSHFLPWIRSHTKEENGLAL

SEQ ID NO: 272 - protein, 253 aa, Artificial Sequence
  UROKINASE-TYPE PLASMINOGEN ACTIVATOR (u-PA) protease domain F30Y/R35Y/R36H/H37K/V38E/T39F/Y40F/V41R/T97aI/L97b A/H99Q/C122S/M157K
IIGGEFTTIENQPWYAAIYYHKRGGSEFFRCGGSLISPCWVISATHCFIDYPKKEDYIVYLGRSRLNSNTQGEMKFEVENLILHKDYSADIAAQHNDIALLKIRSKEGRCAQPSRTIQTISLPSMYNDPQFGTSCEITGFGKENSTDYLYPEQLKKTVVKLISHRECQQPHYYGSEVTTKMLCAADPQWKTDSCQGDSGGPLVCSLQGRMTLTGIVSWGRGCALKDKPGVYTRVSHFLPWIRSHTKEENGLAL

SEQ ID NO: 273 - protein, 253 aa, Artificial Sequence
  UROKINASE-TYPE PLASMINOGEN ACTIVATOR (u-PA) protease domain F30Y/R36H/V38E/Y40H/V41R/T97aE/L97bA/H99Q/C122S/Y1 49R/M157K
IIGGEFTTIENQPWYAAIYRHHRGGSETHRCGGSLISPCWVISATHCFIDYPKKEDYIVYLGRSRLNSNTQGEMKFEVENLILHKDYSADEAAQHNDIALLKIRSKEGRCAQPSRTIQTISLPSMYNDPQFGTSCEITGFGKENSTDRLYPEQLKKTVVKLISHRECQQPHYYGSEVTTKMLCAADPQWKTDSCQGDSGGPLVCSLQGRMTLTGIVSWGRGCALKDKPGVYTRVSHFLPWIRSHTKEENGLAL

SEQ ID NO: 274 - protein, 253 aa, Artificial Sequence
  UROKINASE-TYPE PLASMINOGEN ACTIVATOR (u-PA) protease domain L97bA/H99Q/C122S
IIGGEFTTIENQPWFAAIYRRHRGGSVTYVCGGSLISPCWVISATHCFIDYPKKEDYIVYLGRSRLNSNTQGEMKFEVENLILHKDYSADTAAQHNDIALLKIRSKEGRCAQPSRTIQTISLPSMYNDPQFGTSCEITGFGKENSTDYLYPEQLKMTVVKLISHRECQQPHYYGSEVTTKMLCAADPQWKTDSCQGDSGGPLVCSLQGRMTLTGIVSWGRGCALKDKPGVYTRVSHFLPWIRSHTKEENGLAL

SEQ ID NO: 275 - protein, 253 aa, Artificial Sequence
  UROKINASE-TYPE PLASMINOGEN ACTIVATOR (u-PA) protease domain F30Y/R35Y/R36H/H37K/V38E/T39F/Y40F/V41R/T97aI/L97b A/H99Q/Y149R/M157K
IIGGEFTTIENQPWYAAIYYHKRGGSEFFRCGGSLISPCWVISATHCFIDYPKKEDYIVYLGRSRLNSNTQGEMKFEVENLILHKDYSADIAAQHNDIALLKIRSKEGRCAQPSRTIQTICLPSMYNDPQFGTSCEITGFGKENSTDRLYPEQLKKTVVKLISHRECQQPHYYGSEVTTKMLCAADPQWKTDSCQGDSGGPLVCSLQGRMTLTGIVSWGRGCALKDKPGVYTRVSHFLPWIRSHTKEENGLAL

SEQ ID NO: 276 - protein, 253 aa, Artificial Sequence
  UROKINASE-TYPE PLASMINOGEN ACTIVATOR (u-PA) protease domain F30Y/R35Y/R36H/H37K/V38E/T39F/Y40F/V41R/K61R/K62R/ T97aI/L97bA/H99Q/C122S/Y149R/M157K
IIGGEFTTIENQPWYAAIYYHKRGGSEFFRCGGSLISPCWVISATHCFIDYPRREDYIVYLGRSRLNSNTQGEMKFEVENLILHKDYSADIAAQHNDIALLKIRSKEGRCAQPSRTIQTISLPSMYNDPQFGTSCEITGFGKENSTDRLYPEQLKKTVVKLISHRECQQPHYYGSEVTTKMLCAADPQWKTDSCQGDSGGPLVCSLQGRMTLTGIVSWGRGCALKDKPGVYTRVSHFLPWIRSHTKEENGLAL

SEQ ID NO: 277 - protein, 253 aa, Artificial Sequence
  UROKINASE-TYPE PLASMINOGEN ACTIVATOR (u-PA) protease domain F30Y/R35Y/R36H/H37K/V38E/T39F/Y40F/V41R/K82R/T97aI /L97bA/H99Q/K110aR/C122S/Y149R/M157K
IIGGEFTTIENQPWYAAIYYHKRGGSEFFRCGGSLISPCWVISATHCFIDYPKKEDYIVYLGRSRLNSNTQGEMRFEVENLILHKDYSADIAAQHNDIALLKIRSREGRCAQPSRTIQTISLPSMYNDPQFGTSCEITGFGKENSTDRLYPEQLKKTVVKLISHRECQQPHYYGSEVTTKMLCAADPQWKTDSCQGDSGGPLVCSLQGRMTLTGIVSWGRGCALKDKPGVYTRVSHFLPWIRSHTKEENGLAL

SEQ ID NO: 278 - protein, 253 aa, Artificial Sequence
  UROKINASE-TYPE PLASMINOGEN ACTIVATOR (u-PA) protease domain F30Y/R35Y/R36H/H37K/V38E/T39F/Y40F/V41R/K92R/T97aI /L97bA/H99Q/C122S/Y149R/M157K
IIGGEFTTIENQPWYAAIYYHKRGGSEFFRCGGSLISPCWVISATHCFIDYPKKEDYIVYLGRSRLNSNTQGEMKFEVENLILHRDYSADIAAQHNDIALLKIRSKEGRCAQPSRTIQTISLPSMYNDPQFGTSCEITGFGKENSTDRLYPEQLKKTVVKLISHRECQQPHYYGSEVTTKMLCAADPQWKTDSCQGDSGGPLVCSLQGRMTLTGIVSWGRGCALKDKPGVYTRVSHFLPWIRSHTKEENGLAL

SEQ ID NO: 279 - protein, 253 aa, Artificial Sequence
  UROKINASE-TYPE PLASMINOGEN ACTIVATOR (u-PA) protease domain F30Y/R35Y/R36H/H37K/V38E/T39F/Y40F/V41R/K92S/T97aI /L97bA/H99Q/C122S/Y149R/M157K
IIGGEFTTIENQPWYAAIYYHKRGGSEFFRCGGSLISPCWVISATHCFIDYPKKEDYIVYLGRSRLNSNTQGEMKFEVENLILHSDYSADIAAQHNDIALLKIRSKEGRCAQPSRTIQTISLPSMYNDPQFGTSCEITGFGKENSTDRLYPEQLKKTVVKLISHRECQQPHYYGSEVTTKMLCAADPQWKTDSCQGDSGGPLVCSLQGRMTLTGIVSWGRGCALKDKPGVYTRVSHFLPWIRSHTKEENGLAL

SEQ ID NO: 280 - protein, 253 aa, Artificial Sequence
  UROKINASE-TYPE PLASMINOGEN ACTIVATOR (u-PA) protease domain F30Y/R35Y/R36H/H37K/V38E/T39F/Y40F/V41R/T97aI/L97b A/H99Q/C122S/Y149R/M157K/K179R
IIGGEFTTIENQPWYAAIYYHKRGGSEFFRCGGSLISPCWVISATHCFIDYPKKEDYIVYLGRSRLNSNTQGEMKFEVENLILHKDYSADIAAQHNDIALLKIRSKEGRCAQPSRTIQTISLPSMYNDPQFGTSCEITGFGKENSTDRLYPEQLKKTVVKLISHRECQQPHYYGSEVTTRMLCAADPQWKTDSCQGDSGGPLVCSLQGRMTLTGIVSWGRGCALKDKPGVYTRVSHFLPWIRSHTKEENGLAL

SEQ ID NO: 281 - protein, 253 aa, Artificial Sequence
  UROKINASE-TYPE PLASMINOGEN ACTIVATOR (u-PA) protease domain F30Y/R35Y/R36H/H37K/V38E/T39F/Y40F/V41R/T97aI/L97b A/H99Q/C122S/Y149R/M157K/K179S
IIGGEFTTIENQPWYAAIYYHKRGGSEFFRCGGSLISPCWVISATHCFIDYPKKEDYIVYLGRSRLNSNTQGEMKFEVENLILHKDYSADIAAQHNDIALLKIRSKEGRCAQPSRTIQTISLPSMYNDPQFGTSCEITGFGKENSTDRLYPEQLKKTVVKLISHRECQQPHYYGSEVTTSMLCAADPQWKTDSCQGDSGGPLVCSLQGRMTLTGIVSWGRGCALKDKPGVYTRVSHFLPWIRSHTKEENGLAL

SEQ ID NO: 282 - protein, 253 aa, Artificial Sequence
  UROKINASE-TYPE PLASMINOGEN ACTIVATOR (u-PA) protease domain F30Y/R35Y/R36H/H37K/V38E/T39F/Y40F/V41R/T97aI/L97b A/H99Q/C122S/Y149R/M157K/K187S/K223S/K224Y
IIGGEFTTIENQPWYAAIYYHKRGGSEFFRCGGSLISPCWVISATHCFIDYPKKEDYIVYLGRSRLNSNTQGEMKFEVENLILHKDYSADIAAQHNDIALLKIRSKEGRCAQPSRTIQTISLPSMYNDPQFGTSCEITGFGKENSTDRLYPEQLKKTVVKLISHRECQQPHYYGSEVTTKMLCAADPQWSTDSCQGDSGGPLVCSLQGRMTLTGIVSWGRGCALSDYPGVYTRVSHFLPWIRSHTKEENGLAL

SEQ ID NO: 283 - protein, 253 aa, Artificial Sequence
  UROKINASE-TYPE PLASMINOGEN ACTIVATOR (u-PA) protease domain F30Y/R35W/R36H/H37S/V38E/T39Y/Y40H/V41R/Y60bN/T97a E/L97bA/H99Q/C122S/M157K
IIGGEFTTIENQPWYAAIYWHSRGGSEYHRCGGSLISPCWVISATHCFIDNPKKEDYIVYLGRSRLNSNTQGEMKFEVENLILHKDYSADEAAQHNDIALLKIRSKEGRCAQPSRTIQTISLPSMYNDPQFGTSCEITGFGKENSTDYLYPEQLKKTVVKLISHRECQQPHYYGSEVTTKMLCAADPQWKTDSCQGDSGGPLVCSLQGRMTLTGIVSWGRGCALKDKPGVYTRVSHFLPWIRSHTKEENGLAL

SEQ ID NO: 284 - protein, 253 aa, Artificial Sequence
  UROKINASE-TYPE PLASMINOGEN ACTIVATOR (u-PA) protease domain F30Y/R35W/R36H/H37S/V38E/T39Y/Y40H/V41R/Y60bN/T97a E/L97bA/H99Q/C122S
IIGGEFTTIENQPWYAAIYWHSRGGSEYHRCGGSLISPCWVISATHCFIDNPKKEDYIVYLGRSRLNSNTQGEMKFEVENLILHKDYSADEAAQHNDIALLKIRSKEGRCAQPSRTIQTISLPSMYNDPQFGTSCEITGFGKENSTDYLYPEQLKMTVVKLISHRECQQPHYYGSEVTTKMLCAADPQWKTDSCQGDSGGPLVCSLQGRMTLTGIVSWGRGCALKDKPGVYTRVSHFLPWIRSHTKEENGLAL

SEQ ID NO: 285 - protein, 253 aa, Artificial Sequence
  UROKINASE-TYPE PLASMINOGEN ACTIVATOR (u-PA) protease domain F30Y/R35W/H37S/V38E/T39Y/Y40H/V41R/Y60bN/T97aE/L97 bA/H99Q/C122S/Y149R
IIGGEFTTIENQPWYAAIYWRSRGGSEYHRCGGSLISPCWVISATHCFIDNPKKEDYIVYLGRSRLNSNTQGEMKFEVENLILHKDYSADEAAQHNDIALLKIRSKEGRCAQPSRTIQTISLPSMYNDPQFGTSCEITGFGKENSTDRLYPEQLKMTVVKLISHRECQQPHYYGSEVTTKMLCAADPQWKTDSCQGDSGGPLVCSLQGRMTLTGIVSWGRGCALKDKPGVYTRVSHFLPWIRSHTKEENGLAL

SEQ ID NO: 286 - protein, 253 aa, Artificial Sequence
  UROKINASE-TYPE PLASMINOGEN ACTIVATOR (u-PA) protease domain F30Y/R35W/H37S/V38E/T39Y/Y40H/V41R/Y60bN/T97aE/L97 bA/H99Q/C122S/M157K
IIGGEFTTIENQPWYAAIYWRSRGGSEYHRCGGSLISPCWVISATHCFIDNPKKEDYIVYLGRSRLNSNTQGEMKFEVENLILHKDYSADEAAQHNDIALLKIRSKEGRCAQPSRTIQTISLPSMYNDPQFGTSCEITGFGKENSTDYLYPEQLKKTVVKLISHRECQQPHYYGSEVTTKMLCAADPQWKTDSCQGDSGGPLVCSLQGRMTLTGIVSWGRGCALKDKPGVYTRVSHFLPWIRSHTKEENGLAL

SEQ ID NO: 287 - protein, 253 aa, Artificial Sequence
  UROKINASE-TYPE PLASMINOGEN ACTIVATOR (u-PA) protease domain F30Y/R35Y/R36H/H37K/V38E/T39F/Y40F/V41R/K61S/K62S/ T97aI/L97bA/H99Q/C122S/Y149R/M157K
IIGGEFTTIENQPWYAAIYYHKRGGSEFFRCGGSLISPCWVISATHCFIDYPSSEDYIVYLGRSRLNSNTQGEMKFEVENLILHKDYSADIAAQHNDIALLKIRSKEGRCAQPSRTIQTISLPSMYNDPQFGTSCEITGFGKENSTDRLYPEQLKKTVVKLISHRECQQPHYYGSEVTTKMLCAADPQWKTDSCQGDSGGPLVCSLQGRMTLTGIVSWGRGCALKDKPGVYTRVSHFLPWIRSHTKEENGLAL

SEQ ID NO: 288 - protein, 253 aa, Artificial Sequence
  UROKINASE-TYPE PLASMINOGEN ACTIVATOR (u-PA) protease domain F30Y/R35Y/R36H/H37K/V38E/T39F/Y40F/V41R/K82S/T97aI /L97bA/H99Q/K110aS/C122S/Y149R/M157K
IIGGEFTTIENQPWYAAIYYHKRGGSEFFRCGGSLISPCWVISATHCFIDYPKKEDYIVYLGRSRLNSNTQGEMSFEVENLILHKDYSADIAAQHNDIALLKIRSSEGRCAQPSRTIQTISLPSMYNDPQFGTSCEITGFGKENSTDRLYPEQLKKTVVKLISHRECQQPHYYGSEVTTKMLCAADPQWKTDSCQGDSGGPLVCSLQGRMTLTGIVSWGRGCALKDKPGVYTRVSHFLPWIRSHTKEENGLAL

SEQ ID NO: 289 - protein, 253 aa, Artificial Sequence
  UROKINASE-TYPE PLASMINOGEN ACTIVATOR (u-PA) protease domain F30Y/R35Y/R36H/H37K/V38E/T39F/Y40F/V41R/T97aI/L97b A/H99Q/C122S/Y149R/M157K/K187R/K223R/K224R
IIGGEFTTIENQPWYAAIYYHKRGGSEFFRCGGSLISPCWVISATHCFIDYPKKEDYIVYLGRSRLNSNTQGEMKFEVENLILHKDYSADIAAQHNDIALLKIRSKEGRCAQPSRTIQTISLPSMYNDPQFGTSCEITGFGKENSTDRLYPEQLKKTVVKLISHRECQQPHYYGSEVTTKMLCAADPQWRTDSCQGDSGGPLVCSLQGRMTLTGIVSWGRGCALRDRPGVYTRVSHFLPWIRSHTKEENGLAL

SEQ ID NO: 290 - protein, 253 aa, Artificial Sequence
  UROKINASE-TYPE PLASMINOGEN ACTIVATOR (u-PA) protease domain F30Y/R35W/H37S/V38E/T39Y/Y40H/V41R/Y60bN/T97aE/L97 bA/H99Q/C122S
IIGGEFTTIENQPWYAAIYWRSRGGSEYHRCGGSLISPCWVISATHCFIDNPKKEDYIVYLGRSRLNSNTQGEMKFEVENLILHKDYSADEAAQHNDIALLKIRSKEGRCAQPSRTIQTISLPSMYNDPQFGTSCEITGFGKENSTDYLYPEQLKMTVVKLISHRECQQPHYYGSEVTTKMLCAADPQWKTDSCQGDSGGPLVCSLQGRMTLTGIVSWGRGCALKDKPGVYTRVSHFLPWIRSHTKEENGLAL

SEQ ID NO: 291 - protein, 253 aa, Artificial Sequence
  UROKINASE-TYPE PLASMINOGEN ACTIVATOR (u-PA) protease domain R35W/H37P/R37aN/V38E/T39Y/V41R/D60aP/Y60bL/T97aI/L 97bA/H99Q/C122S
IIGGEFTTIENQPWFAAIYWRPNGGSEYYRCGGSLISPCWVISATHCFIPLPKKEDYIVYLGRSRLNSNTQGEMKFEVENLILHKDYSADIAAQHNDIALLKIRSKEGRCAQPSRTIQTISLPSMYNDPQFGTSCEITGFGKENSTDYLYPEQLKMTVVKLISHRECQQPHYYGSEVTTKMLCAADPQWKTDSCQGDSGGPLVCSLQGRMTLTGIVSWGRGCALKDKPGVYTRVSHFLPWIRSHTKEENGLAL

SEQ ID NO: 292 - protein, 253 aa, Artificial Sequence
  UROKINASE-TYPE PLASMINOGEN ACTIVATOR (u-PA) protease domain F30Y/R35W/R36H/H37S/V38E/T39Y/Y40F/V41R/Y60bN/T97a E/L97bA/H99Q/C122S/Y149R/M157K
IIGGEFTTIENQPWYAAIYWHSRGGSEYFRCGGSLISPCWVISATHCFIDNPKKEDYIVYLGRSRLNSNTQGEMKFEVENLILHKDYSADEAAQHNDIALLKIRSKEGRCAQPSRTIQTISLPSMYNDPQFGTSCEITGFGKENSTDRLYPEQLKKTVVKLISHRECQQPHYYGSEVTTKMLCAADPQWKTDSCQGDSGGPLVCSLQGRMTLTGIVSWGRGCALKDKPGVYTRVSHFLPWIRSHTKEENGLAL

SEQ ID NO: 293 - protein, 253 aa, Artificial Sequence
  UROKINASE-TYPE PLASMINOGEN ACTIVATOR (u-PA) protease domain V38E/V41R/T97aI/L97bA/H99Q/C122S
IIGGEFTTIENQPWFAAIYRRHRGGSETYRCGGSLISPCWVISATHCFIDYPKKEDYIVYLGRSRLNSNTQGEMKFEVENLILHKDYSADIAAQHNDIALLKIRSKEGRCAQPSRTIQTISLPSMYNDPQFGTSCEITGFGKENSTDYLYPEQLKMTVVKLISHRECQQPHYYGSEVTTKMLCAADPQWKTDSCQGDSGGPLVCSLQGRMTLTGIVSWGRGCALKDKPGVYTRVSHFLPWIRSHTKEENGLAL

SEQ ID NO: 294 - protein, 253 aa, Artificial Sequence
  UROKINASE-TYPE PLASMINOGEN ACTIVATOR (u-PA) protease domain V38E/T97aE/L97bA/H99Q/C122S
IIGGEFTTIENQPWFAAIYRRHRGGSETYVCGGSLISPCWVISATHCFIDYPKKEDYIVYLGRSRLNSNTQGEMKFEVENLILHKDYSADEAAQHNDIALLKIRSKEGRCAQPSRTIQTISLPSMYNDPQFGTSCEITGFGKENSTDYLYPEQLKMTVVKLISHRECQQPHYYGSEVTTKMLCAADPQWKTDSCQGDSGGPLVCSLQGRMTLTGIVSWGRGCALKDKPGVYTRVSHFLPWIRSHTKEENGLAL

SEQ ID NO: 295 - protein, 253 aa, Artificial Sequence
  UROKINASE-TYPE PLASMINOGEN ACTIVATOR (u-PA) protease domain V38E/T97aI/L97bA/H99Q/C122S
IIGGEFTTIENQPWFAAIYRRHRGGSETYVCGGSLISPCWVISATHCFIDYPKKEDYIVYLGRSRLNSNTQGEMKFEVENLILHKDYSADIAAQHNDIALLKIRSKEGRCAQPSRTIQTISLPSMYNDPQFGTSCEITGFGKENSTDYLYPEQLKMTVVKLISHRECQQPHYYGSEVTTKMLCAADPQWKTDSCQGDSGGPLVCSLQGRMTLTGIVSWGRGCALKDKPGVYTRVSHFLPWIRSHTKEENGLAL

SEQ ID NO: 296 - protein, 253 aa, Artificial Sequence
  UROKINASE-TYPE PLASMINOGEN ACTIVATOR (u-PA) protease domain V38D/L97bR/H99E/C122S/E175D
IIGGEFTTIENQPWFAAIYRRHRGGSDTYVCGGSLISPCWVISATHCFIDYPKKEDYIVYLGRSRLNSNTQGEMKFEVENLILHKDYSADTRAEHNDIALLKIRSKEGRCAQPSRTIQTISLPSMYNDPQFGTSCEITGFGKENSTDYLYPEQLKMTVVKLISHRECQQPHYYGSDVTTKMLCAADPQWKTDSCQGDSGGPLVCSLQGRMTLTGIVSWGRGCALKDKPGVYTRVSHFLPWIRSHTKEENGLAL

SEQ ID NO: 297 - protein, 253 aa, Artificial Sequence
  UROKINASE-TYPE PLASMINOGEN ACTIVATOR (u-PA) protease domain V38D/L97bR/H99E/C122S/E175D/R217E
IIGGEFTTIENQPWFAAIYRRHRGGSDTYVCGGSLISPCWVISATHCFIDYPKKEDYIVYLGRSRLNSNTQGEMKFEVENLILHKDYSADTRAEHNDIALLKIRSKEGRCAQPSRTIQTISLPSMYNDPQFGTSCEITGFGKENSTDYLYPEQLKMTVVKLISHRECQQPHYYGSDVTTKMLCAADPQWKTDSCQGDSGGPLVCSLQGRMTLTGIVSWGEGCALKDKPGVYTRVSHFLPWIRSHTKEENGLAL

SEQ ID NO: 298 - protein, 253 aa, Artificial Sequence
  UROKINASE-TYPE PLASMINOGEN ACTIVATOR (u-PA) protease domain V38D/L97bR/H99E/C122S/E175D/K224R
IIGGEFTTIENQPWFAAIYRRHRGGSDTYVCGGSLISPCWVISATHCFIDYPKKEDYIVYLGRSRLNSNTQGEMKFEVENLILHKDYSADTRAEHNDIALLKIRSKEGRCAQPSRTIQTISLPSMYNDPQFGTSCEITGFGKENSTDYLYPEQLKMTVVKLISHRECQQPHYYGSDVTTKMLCAADPQWKTDSCQGDSGGPLVCSLQGRMTLTGIVSWGRGCALKDRPGVYTRVSHFLPWIRSHTKEENGLAL

SEQ ID NO: 299 - protein, 253 aa, Artificial Sequence
  UROKINASE-TYPE PLASMINOGEN ACTIVATOR (u-PA) protease domain R35Q/H37Y/R37aE/V38D/T39Y/V41R/D60aP/Y60bQ/T97aI/L 97bA/H99Q/C122S/Y149R
IIGGEFTTIENQPWFAAIYQRYEGGSDYYRCGGSLISPCWVISATHCFIPQPKKEDYIVYLGRSRLNSNTQGEMKFEVENLILHKDYSADIAAQHNDIALLKIRSKEGRCAQPSRTIQTISLPSMYNDPQFGTSCEITGFGKENSTDRLYPEQLKMTVVKLISHRECQQPHYYGSEVTTKMLCAADPQWKTDSCQGDSGGPLVCSLQGRMTLTGIVSWGRGCALKDKPGVYTRVSHFLPWIRSHTKEENGLAL

SEQ ID NO: 300 - protein, 253 aa, Artificial Sequence
  UROKINASE-TYPE PLASMINOGEN ACTIVATOR (u-PA) protease domain R35Q/H37Y/V38E/T39Y/V41R/D60aP/T97aI/L97bA/H99Q/C1 22S/Y149R
IIGGEFTTIENQPWFAAIYQRYRGGSEYYRCGGSLISPCWVISATHCFIPYPKKEDYIVYLGRSRLNSNTQGEMKFEVENLILHKDYSADIAAQHNDIALLKIRSKEGRCAQPSRTIQTISLPSMYNDPQFGTSCEITGFGKENSTDRLYPEQLKMTVVKLISHRECQQPHYYGSEVTTKMLCAADPQWKTDSCQGDSGGPLVCSLQGRMTLTGIVSWGRGCALKDKPGVYTRVSHFLPWIRSHTKEENGLAL

SEQ ID NO: 301 - protein, 253 aa, Artificial Sequence
  UROKINASE-TYPE PLASMINOGEN ACTIVATOR (u-PA) protease domain V38E/V41L/Y60bL/L97bA/H99Q/C122S
IIGGEFTTIENQPWFAAIYRRHRGGSETYLCGGSLISPCWVISATHCFIDLPKKEDYIVYLGRSRLNSNTQGEMKFEVENLILHKDYSADTAAQHNDIALLKIRSKEGRCAQPSRTIQTISLPSMYNDPQFGTSCEITGFGKENSTDYLYPEQLKMTVVKLISHRECQQPHYYGSEVTTKMLCAADPQWKTDSCQGDSGGPLVCSLQGRMTLTGIVSWGRGCALKDKPGVYTRVSHFLPWIRSHTKEENGLAL

SEQ ID NO: 302 - protein, 253 aa, Artificial Sequence
  UROKINASE-TYPE PLASMINOGEN ACTIVATOR (u-PA) protease domain L97bG/H99Q/C122S/R217Q
IIGGEFTTIENQPWFAAIYRRHRGGSVTYVCGGSLISPCWVISATHCFIDYPKKEDYIVYLGRSRLNSNTQGEMKFEVENLILHKDYSADTGAQHNDIALLKIRSKEGRCAQPSRTIQTISLPSMYNDPQFGTSCEITGFGKENSTDYLYPEQLKMTVVKLISHRECQQPHYYGSEVTTKMLCAADPQWKTDSCQGDSGGPLVCSLQGRMTLTGIVSWGQGCALKDKPGVYTRVSHFLPWIRSHTKEENGLAL

SEQ ID NO: 303 - protein, 253 aa, Artificial Sequence
  UROKINASE-TYPE PLASMINOGEN ACTIVATOR (u-PA) protease domain V38D/H99Q/C122S/R217Q
IIGGEFTTIENQPWFAAIYRRHRGGSDTYVCGGSLISPCWVISATHCFIDYPKKEDYIVYLGRSRLNSNTQGEMKFEVENLILHKDYSADTLAQHNDIALLKIRSKEGRCAQPSRTIQTISLPSMYNDPQFGTSCEITGFGKENSTDYLYPEQLKMTVVKLISHRECQQPHYYGSEVTTKMLCAADPQWKTDSCQGDSGGPLVCSLQGRMTLTGIVSWGQGCALKDKPGVYTRVSHFLPWIRSHTKEENGLAL

SEQ ID NO: 304 - protein, 253 aa, Artificial Sequence
  UROKINASE-TYPE PLASMINOGEN ACTIVATOR (u-PA) protease domain V38D/L97bG/C122S/R217Q
IIGGEFTTIENQPWFAAIYRRHRGGSDTYVCGGSLISPCWVISATHCFIDYPKKEDYIVYLGRSRLNSNTQGEMKFEVENLILHKDYSADTGAHHNDIALLKIRSKEGRCAQPSRTIQTISLPSMYNDPQFGTSCEITGFGKENSTDYLYPEQLKMTVVKLISHRECQQPHYYGSEVTTKMLCAADPQWKTDSCQGDSGGPLVCSLQGRMTLTGIVSWGQGCALKDKPGVYTRVSHFLPWIRSHTKEENGLAL

SEQ ID NO: 305 - protein, 253 aa, Artificial Sequence
  UROKINASE-TYPE PLASMINOGEN ACTIVATOR (u-PA) protease domain V38D/L97bG/H99Q/C122S
IIGGEFTTIENQPWFAAIYRRHRGGSDTYVCGGSLISPCWVISATHCFIDYPKKEDYIVYLGRSRLNSNTQGEMKFEVENLILHKDYSADTGAQHNDIALLKIRSKEGRCAQPSRTIQTISLPSMYNDPQFGTSCEITGFGKENSTDYLYPEQLKMTVVKLISHRECQQPHYYGSEVTTKMLCAADPQWKTDSCQGDSGGPLVCSLQGRMTLTGIVSWGRGCALKDKPGVYTRVSHFLPWIRSHTKEENGLAL

SEQ ID NO: 306 - protein, 253 aa, Artificial Sequence
  UROKINASE-TYPE PLASMINOGEN ACTIVATOR (u-PA) protease domain V38D/L97bG/H99Q/C122S/S195A/R217Q
IIGGEFTTIENQPWFAAIYRRHRGGSDTYVCGGSLISPCWVISATHCFIDYPKKEDYIVYLGRSRLNSNTQGEMKFEVENLILHKDYSADTGAQHNDIALLKIRSKEGRCAQPSRTIQTISLPSMYNDPQFGTSCEITGFGKENSTDYLYPEQLKMTVVKLISHRECQQPHYYGSEVTTKMLCAADPQWKTDSCQGDAGGPLVCSLQGRMTLTGIVSWGQGCALKDKPGVYTRVSHFLPWIRSHTKEENGLAL

SEQ ID NO: 307 - protein, 253 aa, Artificial Sequence
  UROKINASE-TYPE PLASMINOGEN ACTIVATOR (u-PA) protease domain Y40Q/Y60bL/L97bA/H99Q/C122S
IIGGEFTTIENQPWFAAIYRRHRGGSVTQVCGGSLISPCWVISATHCFIDLPKKEDYIVYLGRSRLNSNTQGEMKFEVENLILHKDYSADTAAQHNDIALLKIRSKEGRCAQPSRTIQTISLPSMYNDPQFGTSCEITGFGKENSTDYLYPEQLKMTVVKLISHRECQQPHYYGSEVTTKMLCAADPQWKTDSCQGDSGGPLVCSLQGRMTLTGIVSWGRGCALKDKPGVYTRVSHFLPWIRSHTKEENGLAL

SEQ ID NO: 308 - protein, 253 aa, Artificial Sequence
  UROKINASE-TYPE PLASMINOGEN ACTIVATOR (u-PA) protease domain V38E/Y40Q/L97bA/H99Q/C122S
IIGGEFTTIENQPWFAAIYRRHRGGSETQVCGGSLISPCWVISATHCFIDYPKKEDYIVYLGRSRLNSNTQGEMKFEVENLILHKDYSADTAAQHNDIALLKIRSKEGRCAQPSRTIQTISLPSMYNDPQFGTSCEITGFGKENSTDYLYPEQLKMTVVKLISHRECQQPHYYGSEVTTKMLCAADPQWKTDSCQGDSGGPLVCSLQGRMTLTGIVSWGRGCALKDKPGVYTRVSHFLPWIRSHTKEENGLAL

SEQ ID NO: 309 - protein, 253 aa, Artificial Sequence
  UROKINASE-TYPE PLASMINOGEN ACTIVATOR (u-PA) protease domain V38E/Y40Q/V41L/L97bA/C122S
IIGGEFTTIENQPWFAAIYRRHRGGSETQLCGGSLISPCWVISATHCFIDYPKKEDYIVYLGRSRLNSNTQGEMKFEVENLILHKDYSADTAAHHNDIALLKIRSKEGRCAQPSRTIQTISLPSMYNDPQFGTSCEITGFGKENSTDYLYPEQLKMTVVKLISHRECQQPHYYGSEVTTKMLCAADPQWKTDSCQGDSGGPLVCSLQGRMTLTGIVSWGRGCALKDKPGVYTRVSHFLPWIRSHTKEENGLAL

SEQ ID NO: 310 - protein, 253 aa, Artificial Sequence
  UROKINASE-TYPE PLASMINOGEN ACTIVATOR (u-PA) protease domain Y40Q/L97bA/H99Q/C122S
IIGGEFTTIENQPWFAAIYRRHRGGSVTQVCGGSLISPCWVISATHCFIDYPKKEDYIVYLGRSRLNSNTQGEMKFEVENLILHKDYSADTAAQHNDIALLKIRSKEGRCAQPSRTIQTISLPSMYNDPQFGTSCEITGFGKENSTDYLYPEQLKMTVVKLISHRECQQPHYYGSEVTTKMLCAADPQWKTDSCQGDSGGPLVCSLQGRMTLTGIVSWGRGCALKDKPGVYTRVSHFLPWIRSHTKEENGLAL

SEQ ID NO: 311 - protein, 253 aa, Artificial Sequence
  UROKINASE-TYPE PLASMINOGEN ACTIVATOR (u-PA) protease domain T39L/Y40L/V41R/T97aI/L97bA/H99Q/C122S
IIGGEFTTIENQPWFAAIYRRHRGGSVLLRCGGSLISPCWVISATHCFIDYPKKEDYIVYLGRSRLNSNTQGEMKFEVENLILHKDYSADIAAQHNDIALLKIRSKEGRCAQPSRTIQTISLPSMYNDPQFGTSCEITGFGKENSTDYLYPEQLKMTVVKLISHRECQQPHYYGSEVTTKMLCAADPQWKTDSCQGDSGGPLVCSLQGRMTLTGIVSWGRGCALKDKPGVYTRVSHFLPWIRSHTKEENGLAL

SEQ ID NO: 312 - protein, 253 aa, Artificial Sequence
  UROKINASE-TYPE PLASMINOGEN ACTIVATOR (u-PA) protease domain V38D/Y40L/V41R/T97aI/L97bA/H99Q/C122S
IIGGEFTTIENQPWFAAIYRRHRGGSDTLRCGGSLISPCWVISATHCFIDYPKKEDYIVYLGRSRLNSNTQGEMKFEVENLILHKDYSADIAAQHNDIALLKIRSKEGRCAQPSRTIQTISLPSMYNDPQFGTSCEITGFGKENSTDYLYPEQLKMTVVKLISHRECQQPHYYGSEVTTKMLCAADPQWKTDSCQGDSGGPLVCSLQGRMTLTGIVSWGRGCALKDKPGVYTRVSHFLPWIRSHTKEENGLAL

SEQ ID NO: 313 - protein, 253 aa, Artificial Sequence
  UROKINASE-TYPE PLASMINOGEN ACTIVATOR (u-PA) protease domain V38D/T39L/V41R/T97aI/L97bA/H99Q/C122S
IIGGEFTTIENQPWFAAIYRRHRGGSDLYRCGGSLISPCWVISATHCFIDYPKKEDYIVYLGRSRLNSNTQGEMKFEVENLILHKDYSADIAAQHNDIALLKIRSKEGRCAQPSRTIQTISLPSMYNDPQFGTSCEITGFGKENSTDYLYPEQLKMTVVKLISHRECQQPHYYGSEVTTKMLCAADPQWKTDSCQGDSGGPLVCSLQGRMTLTGIVSWGRGCALKDKPGVYTRVSHFLPWIRSHTKEENGLAL

SEQ ID NO: 314 - protein, 253 aa, Artificial Sequence
  UROKINASE-TYPE PLASMINOGEN ACTIVATOR (u-PA) protease domain V38D/T39L/Y40L/T97aI/L97bA/H99Q/C122S
IIGGEFTTIENQPWFAAIYRRHRGGSDLLVCGGSLISPCWVISATHCFIDYPKKEDYIVYLGRSRLNSNTQGEMKFEVENLILHKDYSADIAAQHNDIALLKIRSKEGRCAQPSRTIQTISLPSMYNDPQFGTSCEITGFGKENSTDYLYPEQLKMTVVKLISHRECQQPHYYGSEVTTKMLCAADPQWKTDSCQGDSGGPLVCSLQGRMTLTGIVSWGRGCALKDKPGVYTRVSHFLPWIRSHTKEENGLAL

SEQ ID NO: 315 - protein, 253 aa, Artificial Sequence
  UROKINASE-TYPE PLASMINOGEN ACTIVATOR (u-PA) protease domain V38D/T39L/Y40L/V41R/L97bA/H99Q/C122S
IIGGEFTTIENQPWFAAIYRRHRGGSDLLRCGGSLISPCWVISATHCFIDYPKKEDYIVYLGRSRLNSNTQGEMKFEVENLILHKDYSADTAAQHNDIALLKIRSKEGRCAQPSRTIQTISLPSMYNDPQFGTSCEITGFGKENSTDYLYPEQLKMTVVKLISHRECQQPHYYGSEVTTKMLCAADPQWKTDSCQGDSGGPLVCSLQGRMTLTGIVSWGRGCALKDKPGVYTRVSHFLPWIRSHTKEENGLAL

SEQ ID NO: 316 - protein, 253 aa, Artificial Sequence
  UROKINASE-TYPE PLASMINOGEN ACTIVATOR (u-PA) protease domain V38D/T39L/Y40L/V41R/T97aI/H99Q/C122S
IIGGEFTTIENQPWFAAIYRRHRGGSDLLRCGGSLISPCWVISATHCFIDYPKKEDYIVYLGRSRLNSNTQGEMKFEVENLILHKDYSADILAQHNDIALLKIRSKEGRCAQPSRTIQTISLPSMYNDPQFGTSCEITGFGKENSTDYLYPEQLKMTVVKLISHRECQQPHYYGSEVTTKMLCAADPQWKTDSCQGDSGGPLVCSLQGRMTLTGIVSWGRGCALKDKPGVYTRVSHFLPWIRSHTKEENGLAL

SEQ ID NO: 317 - protein, 253 aa, Artificial Sequence
  UROKINASE-TYPE PLASMINOGEN ACTIVATOR (u-PA) protease domain V38D/L97bR/H99Q/C122S/Y151L/R217V
IIGGEFTTIENQPWFAAIYRRHRGGSDTYVCGGSLISPCWVISATHCFIDYPKKEDYIVYLGRSRLNSNTQGEMKFEVENLILHKDYSADTRAQHNDIALLKIRSKEGRCAQPSRTIQTISLPSMYNDPQFGTSCEITGFGKENSTDYLLPEQLKMTVVKLISHRECQQPHYYGSEVTTKMLCAADPQWKTDSCQGDSGGPLVCSLQGRMTLTGIVSWGVGCALKDKPGVYTRVSHFLPWIRSHTKEENGLAL

SEQ ID NO: 318 - protein, 253 aa, Artificial Sequence
  UROKINASE-TYPE PLASMINOGEN ACTIVATOR (u-PA) protease domain V38D/V41R/L97bR/H99Q/C122S/R217V
IIGGEFTTIENQPWFAAIYRRHRGGSDTYRCGGSLISPCWVISATHCFIDYPKKEDYIVYLGRSRLNSNTQGEMKFEVENLILHKDYSADTRAQHNDIALLKIRSKEGRCAQPSRTIQTISLPSMYNDPQFGTSCEITGFGKENSTDYLYPEQLKMTVVKLISHRECQQPHYYGSEVTTKMLCAADPQWKTDSCQGDSGGPLVCSLQGRMTLTGIVSWGVGCALKDKPGVYTRVSHFLPWIRSHTKEENGLAL

SEQ ID NO: 319 - protein, 253 aa, Artificial Sequence
  UROKINASE-TYPE PLASMINOGEN ACTIVATOR (u-PA) protease domain V38D/Y40L/V41K/L97bR/H99L/C122S/E175D
IIGGEFTTIENQPWFAAIYRRHRGGSDTLKCGGSLISPCWVISATHCFIDYPKKEDYIVYLGRSRLNSNTQGEMKFEVENLILHKDYSADTRALHNDIALLKIRSKEGRCAQPSRTIQTISLPSMYNDPQFGTSCEITGFGKENSTDYLYPEQLKMTVVKLISHRECQQPHYYGSDVTTKMLCAADPQWKTDSCQGDSGGPLVCSLQGRMTLTGIVSWGRGCALKDKPGVYTRVSHFLPWIRSHTKEENGLAL

SEQ ID NO: 320 - protein, 253 aa, Artificial Sequence
  UROKINASE-TYPE PLASMINOGEN ACTIVATOR (u-PA) protease domain V38D/T39L/Y40L/V41K/L97bR/H99L/C122S/E175D
IIGGEFTTIENQPWFAAIYRRHRGGSDLLKCGGSLISPCWVISATHCFIDYPKKEDYIVYLGRSRLNSNTQGEMKFEVENLILHKDYSADTRALHNDIALLKIRSKEGRCAQPSRTIQTISLPSMYNDPQFGTSCEITGFGKENSTDYLYPEQLKMTVVKLISHRECQQPHYYGSDVTTKMLCAADPQWKTDSCQGDSGGPLVCSLQGRMTLTGIVSWGRGCALKDKPGVYTRVSHFLPWIRSHTKEENGLAL

SEQ ID NO: 321 - protein, 253 aa, Artificial Sequence
  UROKINASE-TYPE PLASMINOGEN ACTIVATOR (u-PA) protease domain V38D/T39L/Y40L/V41R/T97aI/L97bA/C122S
IIGGEFTTIENQPWFAAIYRRHRGGSDLLRCGGSLISPCWVISATHCFIDYPKKEDYIVYLGRSRLNSNTQGEMKFEVENLILHKDYSADIAAHHNDIALLKIRSKEGRCAQPSRTIQTISLPSMYNDPQFGTSCEITGFGKENSTDYLYPEQLKMTVVKLISHRECQQPHYYGSEVTTKMLCAADPQWKTDSCQGDSGGPLVCSLQGRMTLTGIVSWGRGCALKDKPGVYTRVSHFLPWIRSHTKEENGLAL

SEQ ID NO: 322 - protein, 253 aa, Artificial Sequence
  UROKINASE-TYPE PLASMINOGEN ACTIVATOR (u-PA) protease domain V38D/V41R/L97bR/H99Q/C122S/Y151L
IIGGEFTTIENQPWFAAIYRRHRGGSDTYRCGGSLISPCWVISATHCFIDYPKKEDYIVYLGRSRLNSNTQGEMKFEVENLILHKDYSADTRAQHNDIALLKIRSKEGRCAQPSRTIQTISLPSMYNDPQFGTSCEITGFGKENSTDYLLPEQLKMTVVKLISHRECQQPHYYGSEVTTKMLCAADPQWKTDSCQGDSGGPLVCSLQGRMTLTGIVSWGRGCALKDKPGVYTRVSHFLPWIRSHTKEENGLAL

SEQ ID NO: 323 - protein, 253 aa, Artificial Sequence
  UROKINASE-TYPE PLASMINOGEN ACTIVATOR (u-PA) protease domain R37aD/G37bD/V38F/T39H/V41R/Y60bK/T97aS/L97bR/H99E/ C122S/Y151L/E175D/Q192T/R217E/K224R
IIGGEFTTIENQPWFAAIYRRHDDGSFHYRCGGSLISPCWVISATHCFIDKPKKEDYIVYLGRSRLNSNTQGEMKFEVENLILHKDYSADSRAEHNDIALLKIRSKEGRCAQPSRTIQTISLPSMYNDPQFGTSCEITGFGKENSTDYLLPEQLKMTVVKLISHRECQQPHYYGSDVTTKMLCAADPQWKTDSCTGDSGGPLVCSLQGRMTLTGIVSWGEGCALKDRPGVYTRVSHFLPWIRSHTKEENGLAL

SEQ ID NO: 324 - protein, 253 aa, Artificial Sequence
  UROKINASE-TYPE PLASMINOGEN ACTIVATOR (u-PA) protease domain H37G/G37bD/V38F/T39H/V41R/Y60bK/T97aS/L97bR/H99E/C 122S/Y151L/E175D/Q192T/R217E/K224R
IIGGEFTTIENQPWFAAIYRRGRDGSFHYRCGGSLISPCWVISATHCFIDKPKKEDYIVYLGRSRLNSNTQGEMKFEVENLILHKDYSADSRAEHNDIALLKIRSKEGRCAQPSRTIQTISLPSMYNDPQFGTSCEITGFGKENSTDYLLPEQLKMTVVKLISHRECQQPHYYGSDVTTKMLCAADPQWKTDSCTGDSGGPLVCSLQGRMTLTGIVSWGEGCALKDRPGVYTRVSHFLPWIRSHTKEENGLAL

SEQ ID NO: 325 - protein, 253 aa, Artificial Sequence
  UROKINASE-TYPE PLASMINOGEN ACTIVATOR (u-PA) protease domain H37G/R37aD/V38F/T39H/V41R/Y60bK/T97aS/L97bR/H99E/C 122S/Y151L/E175D/Q192T/R217E/K224R
IIGGEFTTIENQPWFAAIYRRGDGGSFHYRCGGSLISPCWVISATHCFIDKPKKEDYIVYLGRSRLNSNTQGEMKFEVENLILHKDYSADSRAEHNDIALLKIRSKEGRCAQPSRTIQTISLPSMYNDPQFGTSCEITGFGKENSTDYLLPEQLKMTVVKLISHRECQQPHYYGSDVTTKMLCAADPQWKTDSCTGDSGGPLVCSLQGRMTLTGIVSWGEGCALKDRPGVYTRVSHFLPWIRSHTKEENGLAL

SEQ ID NO: 326 - protein, 253 aa, Artificial Sequence
  UROKINASE-TYPE PLASMINOGEN ACTIVATOR (u-PA) protease domain H37G/R37aD/G37bD/T39H/V41R/Y60bK/T97aS/L97bR/H99E/ C122S/Y151L/E175D/Q192T/R217E/K224R
IIGGEFTTIENQPWFAAIYRRGDDGSVHYRCGGSLISPCWVISATHCFIDKPKKEDYIVYLGRSRLNSNTQGEMKFEVENLILHKDYSADSRAEHNDIALLKIRSKEGRCAQPSRTIQTISLPSMYNDPQFGTSCEITGFGKENSTDYLLPEQLKMTVVKLISHRECQQPHYYGSDVTTKMLCAADPQWKTDSCTGDSGGPLVCSLQGRMTLTGIVSWGEGCALKDRPGVYTRVSHFLPWIRSHTKEENGLAL

SEQ ID NO: 327 - protein, 253 aa, Artificial Sequence
  UROKINASE-TYPE PLASMINOGEN ACTIVATOR (u-PA) protease domain H37G/R37aD/G37bD/V38F/V41R/Y60bK/T97aS/L97bR/H99E/ C122S/Y151L/E175D/Q192T/R217E/K224R
IIGGEFTTIENQPWFAAIYRRGDDGSFTYRCGGSLISPCWVISATHCFIDKPKKEDYIVYLGRSRLNSNTQGEMKFEVENLILHKDYSADSRAEHNDIALLKIRSKEGRCAQPSRTIQTISLPSMYNDPQFGTSCEITGFGKENSTDYLLPEQLKMTVVKLISHRECQQPHYYGSDVTTKMLCAADPQWKTDSCTGDSGGPLVCSLQGRMTLTGIVSWGEGCALKDRPGVYTRVSHFLPWIRSHTKEENGLAL

SEQ ID NO: 328 - protein, 253 aa, Artificial Sequence
  UROKINASE-TYPE PLASMINOGEN ACTIVATOR (u-PA) protease domain H37G/R37aD/G37bD/V38F/T39H/Y60bK/T97aS/L97bR/H99E/ C122S/Y151L/E175D/Q192T/R217E/K224R
IIGGEFTTIENQPWFAAIYRRGDDGSFHYVCGGSLISPCWVISATHCFIDKPKKEDYIVYLGRSRLNSNTQGEMKFEVENLILHKDYSADSRAEHNDIALLKIRSKEGRCAQPSRTIQTISLPSMYNDPQFGTSCEITGFGKENSTDYLLPEQLKMTVVKLISHRECQQPHYYGSDVTTKMLCAADPQWKTDSCTGDSGGPLVCSLQGRMTLTGIVSWGEGCALKDRPGVYTRVSHFLPWIRSHTKEENGLAL

SEQ ID NO: 329 - protein, 253 aa, Artificial Sequence
  UROKINASE-TYPE PLASMINOGEN ACTIVATOR (u-PA) protease domain H37G/R37aD/G37bD/V38F/T39H/V41R/T97aS/L97bR/H99E/C 122S/Y151L/E175D/Q192T/R217E/K224R
IIGGEFTTIENQPWFAAIYRRGDDGSFHYRCGGSLISPCWVISATHCFIDYPKKEDYIVYLGRSRLNSNTQGEMKFEVENLILHKDYSADSRAEHNDIALLKIRSKEGRCAQPSRTIQTISLPSMYNDPQFGTSCEITGFGKENSTDYLLPEQLKMTVVKLISHRECQQPHYYGSDVTTKMLCAADPQWKTDSCTGDSGGPLVCSLQGRMTLTGIVSWGEGCALKDRPGVYTRVSHFLPWIRSHTKEENGLAL

SEQ ID NO: 330 - protein, 253 aa, Artificial Sequence
  UROKINASE-TYPE PLASMINOGEN ACTIVATOR (u-PA) protease domain H37G/R37aD/G37bD/V38F/T39H/V41R/Y60bK/L97bR/H99E/C 122S/Y151L/E175D/Q192T/R217E/K224R
IIGGEFTTIENQPWFAAIYRRGDDGSFHYRCGGSLISPCWVISATHCFIDKPKKEDYIVYLGRSRLNSNTQGEMKFEVENLILHKDYSADTRAEHNDIALLKIRSKEGRCAQPSRTIQTISLPSMYNDPQFGTSCEITGFGKENSTDYLLPEQLKMTVVKLISHRECQQPHYYGSDVTTKMLCAADPQWKTDSCTGDSGGPLVCSLQGRMTLTGIVSWGEGCALKDRPGVYTRVSHFLPWIRSHTKEENGLAL

SEQ ID NO: 331 - protein, 253 aa, Artificial Sequence
  UROKINASE-TYPE PLASMINOGEN ACTIVATOR (u-PA) protease domain H37G/R37aD/G37bD/V38F/T39H/V41R/Y60bK/T97aS/H99E/C 122S/Y151L/E175D/Q192T/R217E/K224R
IIGGEFTTIENQPWFAAIYRRGDDGSFHYRCGGSLISPCWVISATHCFIDKPKKEDYIVYLGRSRLNSNTQGEMKFEVENLILHKDYSADSLAEHNDIALLKIRSKEGRCAQPSRTIQTISLPSMYNDPQFGTSCEITGFGKENSTDYLLPEQLKMTVVKLISHRECQQPHYYGSDVTTKMLCAADPQWKTDSCTGDSGGPLVCSLQGRMTLTGIVSWGEGCALKDRPGVYTRVSHFLPWIRSHTKEENGLAL

SEQ ID NO: 332 - protein, 253 aa, Artificial Sequence
  UROKINASE-TYPE PLASMINOGEN ACTIVATOR (u-PA) protease domain H37G/R37aD/G37bD/V38F/T39H/V41R/Y60bK/T97aS/L97bR/ C122S/Y151L/E175D/Q192T/R217E/K224R
IIGGEFTTIENQPWFAAIYRRGDDGSFHYRCGGSLISPCWVISATHCFIDKPKKEDYIVYLGRSRLNSNTQGEMKFEVENLILHKDYSADSRAHHNDIALLKIRSKEGRCAQPSRTIQTISLPSMYNDPQFGTSCEITGFGKENSTDYLLPEQLKMTVVKLISHRECQQPHYYGSDVTTKMLCAADPQWKTDSCTGDSGGPLVCSLQGRMTLTGIVSWGEGCALKDRPGVYTRVSHFLPWIRSHTKEENGLAL

SEQ ID NO: 333 - protein, 253 aa, Artificial Sequence
  UROKINASE-TYPE PLASMINOGEN ACTIVATOR (u-PA) protease domain H37G/R37aD/G37bD/V38F/T39H/V41R/Y60bK/T97aS/L97bR/ H99E/C122S/E175D/Q192T/R217E/K224R
IIGGEFTTIENQPWFAAIYRRGDDGSFHYRCGGSLISPCWVISATHCFIDKPKKEDYIVYLGRSRLNSNTQGEMKFEVENLILHKDYSADSRAEHNDIALLKIRSKEGRCAQPSRTIQTISLPSMYNDPQFGTSCEITGFGKENSTDYLYPEQLKMTVVKLISHRECQQPHYYGSDVTTKMLCAADPQWKTDSCTGDSGGPLVCSLQGRMTLTGIVSWGEGCALKDRPGVYTRVSHFLPWIRSHTKEENGLAL

SEQ ID NO: 334 - protein, 253 aa, Artificial Sequence
  UROKINASE-TYPE PLASMINOGEN ACTIVATOR (u-PA) protease domain H37G/R37aD/G37bD/V38F/T39H/V41R/Y60bK/T97aS/L97bR/ H99E/C122S/Y151L/Q192T/R217E/K224R
IIGGEFTTIENQPWFAAIYRRGDDGSFHYRCGGSLISPCWVISATHCFIDKPKKEDYIVYLGRSRLNSNTQGEMKFEVENLILHKDYSADSRAEHNDIALLKIRSKEGRCAQPSRTIQTISLPSMYNDPQFGTSCEITGFGKENSTDYLLPEQLKMTVVKLISHRECQQPHYYGSEVTTKMLCAADPQWKTDSCTGDSGGPLVCSLQGRMTLTGIVSWGEGCALKDRPGVYTRVSHFLPWIRSHTKEENGLAL

SEQ ID NO: 335 - protein, 253 aa, Artificial Sequence
  UROKINASE-TYPE PLASMINOGEN ACTIVATOR (u-PA) protease domain H37G/R37aD/G37bD/V38F/T39H/V41R/Y60bK/T97aS/L97bR/ H99E/C122S/Y151L/E175D/R217E/K224R
IIGGEFTTIENQPWFAAIYRRGDDGSFHYRCGGSLISPCWVISATHCFIDKPKKEDYIVYLGRSRLNSNTQGEMKFEVENLILHKDYSADSRAEHNDIALLKIRSKEGRCAQPSRTIQTISLPSMYNDPQFGTSCEITGFGKENSTDYLLPEQLKMTVVKLISHRECQQPHYYGSDVTTKMLCAADPQWKTDSCQGDSGGPLVCSLQGRMTLTGIVSWGEGCALKDRPGVYTRVSHFLPWIRSHTKEENGLAL

SEQ ID NO: 336 - protein, 253 aa, Artificial Sequence
  UROKINASE-TYPE PLASMINOGEN ACTIVATOR (u-PA) protease domain H37G/R37aD/G37bD/V38F/T39H/V41R/Y60bK/T97aS/L97bR/ H99E/C122S/Y151L/E175D/Q192T/K224R
IIGGEFTTIENQPWFAAIYRRGHHGSFHYRCGGSLISPCWVISATHCFIDKPKKEDYIVYLGRSRLNSNTQGEMKFEVENLILHKDYSADSRAEHNDIALLKIRSKEGRCAQPSRTIQTISLPSMYNDPQFGTSCEITGFGKENSTDYLLPEQLKMTVVKLISHRECQQPHYYGSDVTTKMLCAADPQWKTDSCTGDSGGPLVCSLQGRMTLTGIVSWGRGCALKDRPGVYTRVSHFLPWIRSHTKEENGLAL

SEQ ID NO: 337 - protein, 253 aa, Artificial Sequence
  UROKINASE-TYPE PLASMINOGEN ACTIVATOR (u-PA) protease domain H37G/R37aD/G37bD/V38F/T39H/V41R/Y60bK/T97aS/L97bR/ H99E/C122S/Y151L/E175D/Q192T/R217E
IIGGEFTTIENQPWFAAIYRRGHHGSFHYRCGGSLISPCWVISATHCFIDKPKKEDYIVYLGRSRLNSNTQGEMKFEVENLILHKDYSADSRAEHNDIALLKIRSKEGRCAQPSRTIQTISLPSMYNDPQFGTSCEITGFGKENSTDYLLPEQLKMTVVKLISHRECQQPHYYGSDVTTKMLCAADPQWKTDSCTGDSGGPLVCSLQGRMTLTGIVSWGEGCALKDKPGVYTRVSHFLPWIRSHTKEENGLAL

SEQ ID NO: 338 - protein, 253 aa, Artificial Sequence
  UROKINASE-TYPE PLASMINOGEN ACTIVATOR (u-PA) protease domain H37G/R37aD/V38F/T39H/V41R/Y60bK/L97bR/H99E/C122S/Y 151L/E175D/Q192T/R217E/K224R
IIGGEFTTIENQPWFAAIYRRGDGGSFHYRCGGSLISPCWVISATHCFIDKPKKEDYIVYLGRSRLNSNTQGEMKFEVENLILHKDYSADTRAEHNDIALLKIRSKEGRCAQPSRTIQTISLPSMYNDPQFGTSCEITGFGKENSTDYLLPEQLKMTVVKLISHRECQQPHYYGSDVTTKMLCAADPQWKTDSCTGDSGGPLVCSLQGRMTLTGIVSWGEGCALKDRPGVYTRVSHFLPWIRSHTKEENGLAL

SEQ ID NO: 339 - protein, 253 aa, Artificial Sequence
  UROKINASE-TYPE PLASMINOGEN ACTIVATOR (u-PA) protease domain H37G/R37aD/V38F/T39H/V41R/Y60bK/T97aS/L97bR/H99E/C 122S/Y151L/E175D/Q192T/R217E
IIGGEFTTIENQPWFAAIYRRGDGGSFHYRCGGSLISPCWVISATHCFIDKPKKEDYIVYLGRSRLNSNTQGEMKFEVENLILHKDYSADSRAEHNDIALLKIRSKEGRCAQPSRTIQTISLPSMYNDPQFGTSCEITGFGKENSTDYLLPEQLKMTVVKLISHRECQQPHYYGSDVTTKMLCAADPQWKTDSCTGDSGGPLVCSLQGRMTLTGIVSWGEGCALKDKPGVYTRVSHFLPWIRSHTKEENGLAL

SEQ ID NO: 340 - protein, 253 aa, Artificial Sequence
  UROKINASE-TYPE PLASMINOGEN ACTIVATOR (u-PA) protease domain H37G/R37aD/G37bD/V38F/T39H/V41R/Y60bK/L97bR/H99E/C 122S/Y151L/E175D/Q192T/R217E
IIGGEFTTIENQPWFAAIYRRGDDGSFHYRCGGSLISPCWVISATHCFIDKPKKEDYIVYLGRSRLNSNTQGEMKFEVENLILHKDYSADTRAEHNDIALLKIRSKEGRCAQPSRTIQTISLPSMYNDPQFGTSCEITGFGKENSTDYLLPEQLKMTVVKLISHRECQQPHYYGSDVTTKMLCAADPQWKTDSCTGDSGGPLVCSLQGRMTLTGIVSWGEGCALKDKPGVYTRVSHFLPWIRSHTKEENGLAL

SEQ ID NO: 341 - protein, 253 aa, Artificial Sequence
  UROKINASE-TYPE PLASMINOGEN ACTIVATOR (u-PA) protease domain H37G/R37aD/V38F/T39H/V41R/Y60bK/L97bR/H99E/C122S/Y 151L/E175D/Q192T/R217E
IIGGEFTTIENQPWFAAIYRRGDGGSFHYRCGGSLISPCWVISATHCFIDKPKKEDYIVYLGRSRLNSNTQGEMKFEVENLILHKDYSADTRAEHNDIALLKIRSKEGRCAQPSRTIQTISLPSMYNDPQFGTSCEITGFGKENSTDYLLPEQLKMTVVKLISHRECQQPHYYGSDVTTKMLCAADPQWKTDSCTGDSGGPLVCSLQGRMTLTGIVSWGEGCALKDKPGVYTRVSHFLPWIRSHTKEENGLAL

SEQ ID NO: 342 - protein, 253 aa, Artificial Sequence
  UROKINASE-TYPE PLASMINOGEN ACTIVATOR (u-PA) protease domain V38D/C122S/S190H/G216A
IIGGEFTTIENQPWFAAIYRRHRGGSDTYVCGGSLISPCWVISATHCFIDYPKKEDYIVYLGRSRLNSNTQGEMKFEVENLILHKDYSADTLAHHNDIALLKIRSKEGRCAQPSRTIQTISLPSMYNDPQFGTSCEITGFGKENSTDYLYPEQLKMTVVKLISHRECQQPHYYGSEVTTKMLCAADPQWKTDHCQGDSGGPLVCSLQGRMTLTGIVSWARGCALKDKPGVYTRVSHFLPWIRSHTKEENGLAL

SEQ ID NO: 343 - protein, 253 aa, Artificial Sequence
  UROKINASE-TYPE PLASMINOGEN ACTIVATOR (u-PA) protease domain V41L/L97bA/H99Q/C122S
IIGGEFTTIENQPWFAAIYRRHRGGSVTYLCGGSLISPCWVISATHCFIDYPKKEDYIVYLGRSRLNSNTQGEMKFEVENLILHKDYSADTAAQHNDIALLKIRSKEGRCAQPSRTIQTISLPSMYNDPQFGTSCEITGFGKENSTDYLYPEQLKMTVVKLISHRECQQPHYYGSEVTTKMLCAADPQWKTDSCQGDSGGPLVCSLQGRMTLTGIVSWGRGCALKDKPGVYTRVSHFLPWIRSHTKEENGLAL

SEQ ID NO: 344 - protein, 253 aa, Artificial Sequence
  UROKINASE-TYPE PLASMINOGEN ACTIVATOR (u-PA) protease domain Y40Q/V41L/C122S
IIGGEFTTIENQPWFAAIYRRHRGGSVTQLCGGSLISPCWVISATHCFIDYPKKEDYIVYLGRSRLNSNTQGEMKFEVENLILHKDYSADTLAHHNDIALLKIRSKEGRCAQPSRTIQTISLPSMYNDPQFGTSCEITGFGKENSTDYLYPEQLKMTVVKLISHRECQQPHYYGSEVTTKMLCAADPQWKTDSCQGDSGGPLVCSLQGRMTLTGIVSWGRGCALKDKPGVYTRVSHFLPWIRSHTKEENGLAL

SEQ ID NO: 345 - protein, 253 aa, Artificial Sequence
  UROKINASE-TYPE PLASMINOGEN ACTIVATOR (u-PA) protease domain Y40Q/V41L/H99Q/C122S
IIGGEFTTIENQPWFAAIYRRHRGGSVTQLCGGSLISPCWVISATHCFIDYPKKEDYIVYLGRSRLNSNTQGEMKFEVENLILHKDYSADTLAQHNDIALLKIRSKEGRCAQPSRTIQTISLPSMYNDPQFGTSCEITGFGKENSTDYLYPEQLKMTVVKLISHRECQQPHYYGSEVTTKMLCAADPQWKTDSCQGDSGGPLVCSLQGRMTLTGIVSWGRGCALKDKPGVYTRVSHFLPWIRSHTKEENGLAL

SEQ ID NO: 346 - protein, 253 aa, Artificial Sequence
  UROKINASE-TYPE PLASMINOGEN ACTIVATOR (u-PA) protease domain Y40Q/V41L/L97bA/H99Q/C122S/Y149R
IIGGEFTTIENQPWFAAIYRRHRGGSVTQLCGGSLISPCWVISATHCFIDYPKKEDYIVYLGRSRLNSNTQGEMKFEVENLILHKDYSADTAAQHNDIALLKIRSKEGRCAQPSRTIQTISLPSMYNDPQFGTSCEITGFGKENSTDRLYPEQLKMTVVKLISHRECQQPHYYGSEVTTKMLCAADPQWKTDSCQGDSGGPLVCSLQGRMTLTGIVSWGRGCALKDKPGVYTRVSHFLPWIRSHTKEENGLAL

SEQ ID NO: 347 - protein, 253 aa, Artificial Sequence
  UROKINASE-TYPE PLASMINOGEN ACTIVATOR (u-PA) protease domain R37aE/Y40Q/V41L/L97bA/H99Q/C122S
IIGGEFTTIENQPWFAAIYRRHEGGSVTQLCGGSLISPCWVISATHCFIDYPKKEDYIVYLGRSRLNSNTQGEMKFEVENLILHKDYSADTAAQHNDIALLKIRSKEGRCAQPSRTIQTISLPSMYNDPQFGTSCEITGFGKENSTDYLYPEQLKMTVVKLISHRECQQPHYYGSEVTTKMLCAADPQWKTDSCQGDSGGPLVCSLQGRMTLTGIVSWGRGCALKDKPGVYTRVSHFLPWIRSHTKEENGLAL

SEQ ID NO: 348 - protein, 253 aa, Artificial Sequence
  UROKINASE-TYPE PLASMINOGEN ACTIVATOR (u-PA) protease domain R37aE/Y40Q/V41L/L97bA/H99Q/C122S/Y149R
IIGGEFTTIENQPWFAAIYRRHEGGSVTQLCGGSLISPCWVISATHCFIDYPKKEDYIVYLGRSRLNSNTQGEMKFEVENLILHKDYSADTAAQHNDIALLKIRSKEGRCAQPSRTIQTISLPSMYNDPQFGTSCEITGFGKENSTDRLYPEQLKMTVVKLISHRECQQPHYYGSEVTTKMLCAADPQWKTDSCQGDSGGPLVCSLQGRMTLTGIVSWGRGCALKDKPGVYTRVSHFLPWIRSHTKEENGLAL

SEQ ID NO: 349 - protein, 253 aa, Artificial Sequence
  UROKINASE-TYPE PLASMINOGEN ACTIVATOR (u-PA) protease domain Y40Q/V41L/Y60bE/L97bA/H99Q/C122S/Y149R
IIGGEFTTIENQPWFAAIYRRHRGGSVTQLCGGSLISPCWVISATHCFIDEPKKEDYIVYLGRSRLNSNTQGEMKFEVENLILHKDYSADTAAQHNDIALLKIRSKEGRCAQPSRTIQTISLPSMYNDPQFGTSCEITGFGKENSTDRLYPEQLKMTVVKLISHRECQQPHYYGSEVTTKMLCAADPQWKTDSCQGDSGGPLVCSLQGRMTLTGIVSWGRGCALKDKPGVYTRVSHFLPWIRSHTKEENGLAL

SEQ ID NO: 350 - protein, 253 aa, Artificial Sequence
  UROKINASE-TYPE PLASMINOGEN ACTIVATOR (u-PA) protease domain Y40Q/V41L/Y60bT/T97aE/L97bA/H99Q/C122S/Y149R
IIGGEFTTIENQPWFAAIYRRHRGGSVTQLCGGSLISPCWVISATHCFIDTPKKEDYIVYLGRSRLNSNTQGEMKFEVENLILHKDYSADEAAQHNDIALLKIRSKEGRCAQPSRTIQTISLPSMYNDPQFGTSCEITGFGKENSTDRLYPEQLKMTVVKLISHRECQQPHYYGSEVTTKMLCAADPQWKTDSCQGDSGGPLVCSLQGRMTLTGIVSWGRGCALKDKPGVYTRVSHFLPWIRSHTKEENGLAL

SEQ ID NO: 351 - protein, 253 aa, Artificial Sequence
  UROKINASE-TYPE PLASMINOGEN ACTIVATOR (u-PA) protease domain Y40Q/V41L/Y60bS/T97aE/L97bA/H99Q/C122S/Y149R
IIGGEFTTIENQPWFAAIYRRHRGGSVTQLCGGSLISPCWVISATHCFIDSPKKEDYIVYLGRSRLNSNTQGEMKFEVENLILHKDYSADEAAQHNDIALLKIRSKEGRCAQPSRTIQTISLPSMYNDPQFGTSCEITGFGKENSTDRLYPEQLKMTVVKLISHRECQQPHYYGSEVTTKMLCAADPQWKTDSCQGDSGGPLVCSLQGRMTLTGIVSWGRGCALKDKPGVYTRVSHFLPWIRSHTKEENGLAL

SEQ ID NO: 352 - protein, 253 aa, Artificial Sequence
  UROKINASE-TYPE PLASMINOGEN ACTIVATOR (u-PA) protease domain R37aE/Y40Q/V41L/L97bA/C122S
IIGGEFTTIENQPWFAAIYRRHEGGSVTQLCGGSLISPCWVISATHCFIDYPKKEDYIVYLGRSRLNSNTQGEMKFEVENLILHKDYSADTAAHHNDIALLKIRSKEGRCAQPSRTIQTISLPSMYNDPQFGTSCEITGFGKENSTDYLYPEQLKMTVVKLISHRECQQPHYYGSEVTTKMLCAADPQWKTDSCQGDSGGPLVCSLQGRMTLTGIVSWGRGCALKDKPGVYTRVSHFLPWIRSHTKEENGLAL

SEQ ID NO: 353 - protein, 253 aa, Artificial Sequence
  UROKINASE-TYPE PLASMINOGEN ACTIVATOR (u-PA) protease domain Y40Q/V41L/L97bA/C122S/Y149R
IIGGEFTTIENQPWFAAIYRRHRGGSVTQLCGGSLISPCWVISATHCFIDYPKKEDYIVYLGRSRLNSNTQGEMKFEVENLILHKDYSADTAAHHNDIALLKIRSKEGRCAQPSRTIQTISLPSMYNDPQFGTSCEITGFGKENSTDRLYPEQLKMTVVKLISHRECQQPHYYGSEVTTKMLCAADPQWKTDSCQGDSGGPLVCSLQGRMTLTGIVSWGRGCALKDKPGVYTRVSHFLPWIRSHTKEENGLAL

SEQ ID NO: 354 - protein, 253 aa, Artificial Sequence
  UROKINASE-TYPE PLASMINOGEN ACTIVATOR (u-PA) protease domain R37aE/Y40Q/V41L/L97bA/C122S/Y149R
IIGGEFTTIENQPWFAAIYRRHEGGSVTQLCGGSLISPCWVISATHCFIDYPKKEDYIVYLGRSRLNSNTQGEMKFEVENLILHKDYSADTAAHHNDIALLKIRSKEGRCAQPSRTIQTISLPSMYNDPQFGTSCEITGFGKENSTDRLYPEQLKMTVVKLISHRECQQPHYYGSEVTTKMLCAADPQWKTDSCQGDSGGPLVCSLQGRMTLTGIVSWGRGCALKDKPGVYTRVSHFLPWIRSHTKEENGLAL

SEQ ID NO: 355 - protein, 253 aa, Artificial Sequence
  UROKINASE-TYPE PLASMINOGEN ACTIVATOR (u-PA) protease domain R37aE/Y40Q/V41L/Y60bE/L97bA/H99Q/C122S/Y149R
IIGGEFTTIENQPWFAAIYRRHEGGSVTQLCGGSLISPCWVISATHCFIDEPKKEDYIVYLGRSRLNSNTQGEMKFEVENLILHKDYSADTAAQHNDIALLKIRSKEGRCAQPSRTIQTISLPSMYNDPQFGTSCEITGFGKENSTDRLYPEQLKMTVVKLISHRECQQPHYYGSEVTTKMLCAADPQWKTDSCQGDSGGPLVCSLQGRMTLTGIVSWGRGCALKDKPGVYTRVSHFLPWIRSHTKEENGLAL

SEQ ID NO: 356 - protein, 253 aa, Artificial Sequence
  UROKINASE-TYPE PLASMINOGEN ACTIVATOR (u-PA) protease domain R35K/Y40Q/V41L/Y60bE/L97bA/H99Q/C122S/Y149R
IIGGEFTTIENQPWFAAIYKRHRGGSVTQLCGGSLISPCWVISATHCFIDEPKKEDYIVYLGRSRLNSNTQGEMKFEVENLILHKDYSADTAAQHNDIALLKIRSKEGRCAQPSRTIQTISLPSMYNDPQFGTSCEITGFGKENSTDRLYPEQLKMTVVKLISHRECQQPHYYGSEVTTKMLCAADPQWKTDSCQGDSGGPLVCSLQGRMTLTGIVSWGRGCALKDKPGVYTRVSHFLPWIRSHTKEENGLAL

SEQ ID NO: 357 - protein, 253 aa, Artificial Sequence
  UROKINASE-TYPE PLASMINOGEN ACTIVATOR (u-PA) protease domain R37aD/Y40Q/V41L/Y60bT/T97aE/L97bA/H99Q/C122S/Y149R
IIGGEFTTIENQPWFAAIYRRHDGGSVTQLCGGSLISPCWVISATHCFIDTPKKEDYIVYLGRSRLNSNTQGEMKFEVENLILHKDYSADEAAQHNDIALLKIRSKEGRCAQPSRTIQTISLPSMYNDPQFGTSCEITGFGKENSTDRLYPEQLKMTVVKLISHRECQQPHYYGSEVTTKMLCAADPQWKTDSCQGDSGGPLVCSLQGRMTLTGIVSWGRGCALKDKPGVYTRVSHFLPWIRSHTKEENGLAL

SEQ ID NO: 358 - protein, 253 aa, Artificial Sequence
  UROKINASE-TYPE PLASMINOGEN ACTIVATOR (u-PA) protease domain R35S/Y40Q/V41L/Y60bT/T97aE/L97bA/H99Q/C122S/Y149R
IIGGEFTTIENQPWFAAIYSRHRGGSVTQLCGGSLISPCWVISATHCFIDTPKKEDYIVYLGRSRLNSNTQGEMKFEVENLILHKDYSADEAAQHNDIALLKIRSKEGRCAQPSRTIQTISLPSMYNDPQFGTSCEITGFGKENSTDRLYPEQLKMTVVKLISHRECQQPHYYGSEVTTKMLCAADPQWKTDSCQGDSGGPLVCSLQGRMTLTGIVSWGRGCALKDKPGVYTRVSHFLPWIRSHTKEENGLAL

SEQ ID NO: 359 - protein, 253 aa, Artificial Sequence
  UROKINASE-TYPE PLASMINOGEN ACTIVATOR (u-PA) protease domain R37aE/Y40Q/V41L/Y60bS/T97aE/L97bA/H99Q/C122S/Y149R
IIGGEFTTIENQPWFAAIYRRHEGGSVTQLCGGSLISPCWVISATHCFIDSPKKEDYIVYLGRSRLNSNTQGEMKFEVENLILHKDYSADEAAQHNDIALLKIRSKEGRCAQPSRTIQTISLPSMYNDPQFGTSCEITGFGKENSTDRLYPEQLKMTVVKLISHRECQQPHYYGSEVTTKMLCAADPQWKTDSCQGDSGGPLVCSLQGRMTLTGIVSWGRGCALKDKPGVYTRVSHFLPWIRSHTKEENGLAL

SEQ ID NO: 360 - protein, 253 aa, Artificial Sequence
  UROKINASE-TYPE PLASMINOGEN ACTIVATOR (u-PA) protease domain R35V/Y40Q/V41L/Y60bS/T97aE/L97bA/H99Q/C122S/Y149R
IIGGEFTTIENQPWFAAIYVRHRGGSVTQLCGGSLISPCWVISATHCFIDSPKKEDYIVYLGRSRLNSNTQGEMKFEVENLILHKDYSADEAAQHNDIALLKIRSKEGRCAQPSRTIQTISLPSMYNDPQFGTSCEITGFGKENSTDRLYPEQLKMTVVKLISHRECQQPHYYGSEVTTKMLCAADPQWKTDSCQGDSGGPLVCSLQGRMTLTGIVSWGRGCALKDKPGVYTRVSHFLPWIRSHTKEENGLAL

SEQ ID NO: 361 - protein, 253 aa, Artificial Sequence
  UROKINASE-TYPE PLASMINOGEN ACTIVATOR (u-PA) protease domain R37aD/Y40Q/V41L/Y60bE/L97bA/H99Q/C122S/Y149R
IIGGEFTTIENQPWFAAIYRRHDGGSVTQLCGGSLISPCWVISATHCFIDEPKKEDYIVYLGRSRLNSNTQGEMKFEVENLILHKDYSADTAAQHNDIALLKIRSKEGRCAQPSRTIQTISLPSMYNDPQFGTSCEITGFGKENSTDRLYPEQLKMTVVKLISHRECQQPHYYGSEVTTKMLCAADPQWKTDSCQGDSGGPLVCSLQGRMTLTGIVSWGRGCALKDKPGVYTRVSHFLPWIRSHTKEENGLAL

SEQ ID NO: 362 - protein, 253 aa, Artificial Sequence
  UROKINASE-TYPE PLASMINOGEN ACTIVATOR (u-PA) protease domain R35V/R37aE/V38E/V41L/Y60bS/T97aE/L97bA/H99Q/C122S/ Y149R
IIGGEFTTIENQPWFAAIYVRHEGGSETYLCGGSLISPCWVISATHCFIDSPKKEDYIVYLGRSRLNSNTQGEMKFEVENLILHKDYSADEAAQHNDIALLKIRSKEGRCAQPSRTIQTISLPSMYNDPQFGTSCEITGFGKENSTDRLYPEQLKMTVVKLISHRECQQPHYYGSEVTTKMLCAADPQWKTDSCQGDSGGPLVCSLQGRMTLTGIVSWGRGCALKDKPGVYTRVSHFLPWIRSHTKEENGLAL

SEQ ID NO: 363 - protein, 253 aa, Artificial Sequence
  UROKINASE-TYPE PLASMINOGEN ACTIVATOR (u-PA) protease domain R35V/R37aE/Y40Q/Y60bS/T97aE/L97bA/H99Q/C122S/Y149R
IIGGEFTTIENQPWFAAIYVRHEGGSVTQVCGGSLISPCWVISATHCFIDSPKKEDYIVYLGRSRLNSNTQGEMKFEVENLILHKDYSADEAAQHNDIALLKIRSKEGRCAQPSRTIQTISLPSMYNDPQFGTSCEITGFGKENSTDRLYPEQLKMTVVKLISHRECQQPHYYGSEVTTKMLCAADPQWKTDSCQGDSGGPLVCSLQGRMTLTGIVSWGRGCALKDKPGVYTRVSHFLPWIRSHTKEENGLAL

SEQ ID NO: 364 - protein, 253 aa, Artificial Sequence
  UROKINASE-TYPE PLASMINOGEN ACTIVATOR (u-PA) protease domain R35V/R37aE/V38E/Y40Q/V41L/T97aE/L97bA/H99Q/C122S/Y 149R
IIGGEFTTIENQPWFAAIYVRHEGGSETQLCGGSLISPCWVISATHCFIDYPKKEDYIVYLGRSRLNSNTQGEMKFEVENLILHKDYSADEAAQHNDIALLKIRSKEGRCAQPSRTIQTISLPSMYNDPQFGTSCEITGFGKENSTDRLYPEQLKMTVVKLISHRECQQPHYYGSEVTTKMLCAADPQWKTDSCQGDSGGPLVCSLQGRMTLTGIVSWGRGCALKDKPGVYTRVSHFLPWIRSHTKEENGLAL

SEQ ID NO: 365 - protein, 253 aa, Artificial Sequence
  UROKINASE-TYPE PLASMINOGEN ACTIVATOR (u-PA) protease domain R35V/R37aE/V38E/Y40Q/V41L/Y60bS/L97bA/H99Q/C122S/Y 149R
IIGGEFTTIENQPWFAAIYVRHEGGSETQLCGGSLISPCWVISATHCFIDSPKKEDYIVYLGRSRLNSNTQGEMKFEVENLILHKDYSADTAAQHNDIALLKIRSKEGRCAQPSRTIQTISLPSMYNDPQFGTSCEITGFGKENSTDRLYPEQLKMTVVKLISHRECQQPHYYGSEVTTKMLCAADPQWKTDSCQGDSGGPLVCSLQGRMTLTGIVSWGRGCALKDKPGVYTRVSHFLPWIRSHTKEENGLAL

SEQ ID NO: 366 - protein, 253 aa, Artificial Sequence
  UROKINASE-TYPE PLASMINOGEN ACTIVATOR (u-PA) protease domain R35V/R37aE/V38E/Y40Q/V41L/Y60bS/T97aE/H99Q/C122S/Y 149R
IIGGEFTTIENQPWFAAIYVRHEGGSETQLCGGSLISPCWVISATHCFIDSPKKEDYIVYLGRSRLNSNTQGEMKFEVENLILHKDYSADELAQHNDIALLKIRSKEGRCAQPSRTIQTISLPSMYNDPQFGTSCEITGFGKENSTDRLYPEQLKMTVVKLISHRECQQPHYYGSEVTTKMLCAADPQWKTDSCQGDSGGPLVCSLQGRMTLTGIVSWGRGCALKDKPGVYTRVSHFLPWIRSHTKEENGLAL

SEQ ID NO: 367 - protein, 253 aa, Artificial Sequence
  UROKINASE-TYPE PLASMINOGEN ACTIVATOR (u-PA) protease domain R35V/R37aE/V38E/Y40Q/V41L/Y60bS/T97aE/L97bA/C122S/ Y149R
IIGGEFTTIENQPWFAAIYVRHEGGSETQLCGGSLISPCWVISATHCFIDSPKKEDYIVYLGRSRLNSNTQGEMKFEVENLILHKDYSADEAAHHNDIALLKIRSKEGRCAQPSRTIQTISLPSMYNDPQFGTSCEITGFGKENSTDRLYPEQLKMTVVKLISHRECQQPHYYGSEVTTKMLCAADPQWKTDSCQGDSGGPLVCSLQGRMTLTGIVSWGRGCALKDKPGVYTRVSHFLPWIRSHTKEENGLAL

SEQ ID NO: 368 - protein, 253 aa, Artificial Sequence
  UROKINASE-TYPE PLASMINOGEN ACTIVATOR (u-PA) protease domain R35V/R37aE/V38E/Y40Q/V41L/Y60bS/T97aE/L97bA/H99Q/C 122S
IIGGEFTTIENQPWFAAIYVRHEGGSETQLCGGSLISPCWVISATHCFIDSPKKEDYIVYLGRSRLNSNTQGEMKFEVENLILHKDYSADEAAQHNDIALLKIRSKEGRCAQPSRTIQTISLPSMYNDPQFGTSCEITGFGKENSTDYLYPEQLKMTVVKLISHRECQQPHYYGSEVTTKMLCAADPQWKTDSCQGDSGGPLVCSLQGRMTLTGIVSWGRGCALKDKPGVYTRVSHFLPWIRSHTKEENGLAL

SEQ ID NO: 369 - protein, 253 aa, Artificial Sequence
  UROKINASE-TYPE PLASMINOGEN ACTIVATOR (u-PA) protease domain V41R/L97bR/H99Q/C122S/Y151L/R217V
IIGGEFTTIENQPWFAAIYRRHRGGSVTYRCGGSLISPCWVISATHCFIDYPKKEDYIVYLGRSRLNSNTQGEMKFEVENLILHKDYSADTRAQHNDIALLKIRSKEGRCAQPSRTIQTISLPSMYNDPQFGTSCEITGFGKENSTDYLLPEQLKMTVVKLISHRECQQPHYYGSEVTTKMLCAADPQWKTDSCQGDSGGPLVCSLQGRMTLTGIVSWGVGCALKDKPGVYTRVSHFLPWIRSHTKEENGLAL

SEQ ID NO: 370 - protein, 253 aa, Artificial Sequence
  UROKINASE-TYPE PLASMINOGEN ACTIVATOR (u-PA) protease domain V38D/V41R/H99Q/C122S/Y151L/R217V
IIGGEFTTIENQPWFAAIYRRHRGGSDTYRCGGSLISPCWVISATHCFIDYPKKEDYIVYLGRSRLNSNTQGEMKFEVENLILHKDYSADTLAQHNDIALLKIRSKEGRCAQPSRTIQTISLPSMYNDPQFGTSCEITGFGKENSTDYLLPEQLKMTVVKLISHRECQQPHYYGSEVTTKMLCAADPQWKTDSCQGDSGGPLVCSLQGRMTLTGIVSWGVGCALKDKPGVYTRVSHFLPWIRSHTKEENGLAL

SEQ ID NO: 371 - protein, 253 aa, Artificial Sequence
  UROKINASE-TYPE PLASMINOGEN ACTIVATOR (u-PA) protease domain V38D/V41R/L97bR/C122S/Y151L/R217V
IIGGEFTTIENQPWFAAIYRRHRGGSDTYRCGGSLISPCWVISATHCFIDYPKKEDYIVYLGRSRLNSNTQGEMKFEVENLILHKDYSADTRAHHNDIALLKIRSKEGRCAQPSRTIQTISLPSMYNDPQFGTSCEITGFGKENSTDYLLPEQLKMTVVKLISHRECQQPHYYGSEVTTKMLCAADPQWKTDSCQGDSGGPLVCSLQGRMTLTGIVSWGVGCALKDKPGVYTRVSHFLPWIRSHTKEENGLAL

SEQ ID NO: 372 - protein, 253 aa, Artificial Sequence
  UROKINASE-TYPE PLASMINOGEN ACTIVATOR (u-PA) protease domain R37aE/V38E/Y40Q/V41L/Y60bS/T97aE/L97bA/H99Q/C122S/ Y149R
IIGGEFTTIENQPWFAAIYRRHEGGSETQLCGGSLISPCWVISATHCFIDSPKKEDYIVYLGRSRLNSNTQGEMKFEVENLILHKDYSADEAAQHNDIALLKIRSKEGRCAQPSRTIQTISLPSMYNDPQFGTSCEITGFGKENSTDRLYPEQLKMTVVKLISHRECQQPHYYGSEVTTKMLCAADPQWKTDSCQGDSGGPLVCSLQGRMTLTGIVSWGRGCALKDKPGVYTRVSHFLPWIRSHTKEENGLAL

SEQ ID NO: 373 - protein, 253 aa, Artificial Sequence
  UROKINASE-TYPE PLASMINOGEN ACTIVATOR (u-PA) protease domain R35V/V38E/Y40Q/V41L/Y60bS/T97aE/L97bA/H99Q/C122S/Y 149R
IIGGEFTTIENQPWFAAIYVRHRGGSETQLCGGSLISPCWVISATHCFIDSPKKEDYIVYLGRSRLNSNTQGEMKFEVENLILHKDYSADEAAQHNDIALLKIRSKEGRCAQPSRTIQTISLPSMYNDPQFGTSCEITGFGKENSTDRLYPEQLKMTVVKLISHRECQQPHYYGSEVTTKMLCAADPQWKTDSCQGDSGGPLVCSLQGRMTLTGIVSWGRGCALKDKPGVYTRVSHFLPWIRSHTKEENGLAL

SEQ ID NO: 374 - protein, 253 aa, Artificial Sequence
  UROKINASE-TYPE PLASMINOGEN ACTIVATOR (u-PA) protease domain R35V/R37aE/Y40Q/V41L/Y60bS/T97aE/L97bA/H99Q/C122S/ Y149R
IIGGEFTTIENQPWFAAIYVRHEGGSVTQLCGGSLISPCWVISATHCFIDSPKKEDYIVYLGRSRLNSNTQGEMKFEVENLILHKDYSADEAAQHNDIALLKIRSKEGRCAQPSRTIQTISLPSMYNDPQFGTSCEITGFGKENSTDRLYPEQLKMTVVKLISHRECQQPHYYGSEVTTKMLCAADPQWKTDSCQGDSGGPLVCSLQGRMTLTGIVSWGRGCALKDKPGVYTRVSHFLPWIRSHTKEENGLAL

SEQ ID NO: 375 - protein, 253 aa, Artificial Sequence
  UROKINASE-TYPE PLASMINOGEN ACTIVATOR (u-PA) protease domain R35V/R37aE/V38E/Y40Q/Y60bS/T97aE/L97bA/H99Q/C122S/ Y149R
IIGGEFTTIENQPWFAAIYVRHEGGSETQVCGGSLISPCWVISATHCFIDSPKKEDYIVYLGRSRLNSNTQGEMKFEVENLILHKDYSADEAAQHNDIALLKIRSKEGRCAQPSRTIQTISLPSMYNDPQFGTSCEITGFGKENSTDRLYPEQLKMTVVKLISHRECQQPHYYGSEVTTKMLCAADPQWKTDSCQGDSGGPLVCSLQGRMTLTGIVSWGRGCALKDKPGVYTRVSHFLPWIRSHTKEENGLAL

SEQ ID NO: 376 - protein, 253 aa, Artificial Sequence
  UROKINASE-TYPE PLASMINOGEN ACTIVATOR (u-PA) protease domain L97bR/H99Q/C122S/Y151L/R217V
IIGGEFTTIENQPWFAAIYRRHRGGSVTYVCGGSLISPCWVISATHCFIDYPKKEDYIVYLGRSRLNSNTQGEMKFEVENLILHKDYSADTRAQHNDIALLKIRSKEGRCAQPSRTIQTISLPSMYNDPQFGTSCEITGFGKENSTDYLLPEQLKMTVVKLISHRECQQPHYYGSEVTTKMLCAADPQWKTDSCQGDSGGPLVCSLQGRMTLTGIVSWGVGCALKDKPGVYTRVSHFLPWIRSHTKEENGLAL

SEQ ID NO: 377 - protein, 253 aa, Artificial Sequence
  UROKINASE-TYPE PLASMINOGEN ACTIVATOR (u-PA) protease domain V38D/H99Q/C122S/Y151L/R217V
IIGGEFTTIENQPWFAAIYRRHRGGSDTYVCGGSLISPCWVISATHCFIDYPKKEDYIVYLGRSRLNSNTQGEMKFEVENLILHKDYSADTLAQHNDIALLKIRSKEGRCAQPSRTIQTISLPSMYNDPQFGTSCEITGFGKENSTDYLLPEQLKMTVVKLISHRECQQPHYYGSEVTTKMLCAADPQWKTDSCQGDSGGPLVCSLQGRMTLTGIVSWGVGCALKDKPGVYTRVSHFLPWIRSHTKEENGLAL

SEQ ID NO: 378 - protein, 253 aa, Artificial Sequence
  UROKINASE-TYPE PLASMINOGEN ACTIVATOR (u-PA) protease domain V38D/L97bR/C122S/Y151L/R217V
IIGGEFTTIENQPWFAAIYRRHRGGSDTYVCGGSLISPCWVISATHCFIDYPKKEDYIVYLGRSRLNSNTQGEMKFEVENLILHKDYSADTRAHHNDIALLKIRSKEGRCAQPSRTIQTISLPSMYNDPQFGTSCEITGFGKENSTDYLLPEQLKMTVVKLISHRECQQPHYYGSEVTTKMLCAADPQWKTDSCQGDSGGPLVCSLQGRMTLTGIVSWGVGCALKDKPGVYTRVSHFLPWIRSHTKEENGLAL

SEQ ID NO: 379 - protein, 253 aa, Artificial Sequence
  UROKINASE-TYPE PLASMINOGEN ACTIVATOR (u-PA) protease domain V38D/L97bR/H99Q/C122S/R217V
IIGGEFTTIENQPWFAAIYRRHRGGSDTYVCGGSLISPCWVISATHCFIDYPKKEDYIVYLGRSRLNSNTQGEMKFEVENLILHKDYSADTRAQHNDIALLKIRSKEGRCAQPSRTIQTISLPSMYNDPQFGTSCEITGFGKENSTDYLYPEQLKMTVVKLISHRECQQPHYYGSEVTTKMLCAADPQWKTDSCQGDSGGPLVCSLQGRMTLTGIVSWGVGCALKDKPGVYTRVSHFLPWIRSHTKEENGLAL

SEQ ID NO: 380 - protein, 253 aa, Artificial Sequence; identical to SEQ ID NO: 376
  UROKINASE-TYPE PLASMINOGEN ACTIVATOR (u-PA) protease domain L97bR/H99Q/C122S/Y151L/R217V

SEQ ID NO: 381 - protein, 253 aa, Artificial Sequence
  UROKINASE-TYPE PLASMINOGEN ACTIVATOR (u-PA) protease domain H99Q/C122S/Y151L/R217V
IIGGEFTTIENQPWFAAIYRRHRGGSVTYVCGGSLISPCWVISATHCFIDYPKKEDYIVYLGRSRLNSNTQGEMKFEVENLILHKDYSADTLAQHNDIALLKIRSKEGRCAQPSRTIQTISLPSMYNDPQFGTSCEITGFGKENSTDYLLPEQLKMTVVKLISHRECQQPHYYGSEVTTKMLCAADPQWKTDSCQGDSGGPLVCSLQGRMTLTGIVSWGVGCALKDKPGVYTRVSHFLPWIRSHTKEENGLAL

SEQ ID NO: 382 - protein, 253 aa, Artificial Sequence
  UROKINASE-TYPE PLASMINOGEN ACTIVATOR (u-PA) protease domain V41R/H99Q/C122S/Y151L/R217V
IIGGEFTTIENQPWFAAIYRRHRGGSVTYRCGGSLISPCWVISATHCFIDYPKKEDYIVYLGRSRLNSNTQGEMKFEVENLILHKDYSADTLAQHNDIALLKIRSKEGRCAQPSRTIQTISLPSMYNDPQFGTSCEITGFGKENSTDYLLPEQLKMTVVKLISHRECQQPHYYGSEVTTKMLCAADPQWKTDSCQGDSGGPLVCSLQGRMTLTGIVSWGVGCALKDKPGVYTRVSHFLPWIRSHTKEENGLAL

SEQ ID NO: 383 - protein, 253 aa, Artificial Sequence
  UROKINASE-TYPE PLASMINOGEN ACTIVATOR (u-PA) protease domain L97bR/H99Q/C122S/Y151L
IIGGEFTTIENQPWFAAIYRRHRGGSVTYVCGGSLISPCWVISATHCFIDYPKKEDYIVYLGRSRLNSNTQGEMKFEVENLILHKDYSADTRAQHNDIALLKIRSKEGRCAQPSRTIQTISLPSMYNDPQFGTSCEITGFGKENSTDYLLPEQLKMTVVKLISHRECQQPHYYGSEVTTKMLCAADPQWKTDSCQGDSGGPLVCSLQGRMTLTGIVSWGRGCALKDKPGVYTRVSHFLPWIRSHTKEENGLAL

SEQ ID NO: 384 - protein, 253 aa, Artificial Sequence
  UROKINASE-TYPE PLASMINOGEN ACTIVATOR (u-PA) protease domain L97bR/C122S/Y151L/R217V
IIGGEFTTIENQPWFAAIYRRHRGGSVTYVCGGSLISPCWVISATHCFIDYPKKEDYIVYLGRSRLNSNTQGEMKFEVENLILHKDYSADTRAHHNDIALLKIRSKEGRCAQPSRTIQTISLPSMYNDPQFGTSCEITGFGKENSTDYLLPEQLKMTVVKLISHRECQQPHYYGSEVTTKMLCAADPQWKTDSCQGDSGGPLVCSLQGRMTLTGIVSWGVGCALKDKPGVYTRVSHFLPWIRSHTKEENGLAL

SEQ ID NO: 385 - protein, 253 aa, Artificial Sequence
  UROKINASE-TYPE PLASMINOGEN ACTIVATOR (u-PA) protease domain R37aS/V41R/L97bG/H99Q/C122S/R217V
IIGGEFTTIENQPWFAAIYRRHSGGSVTYRCGGSLISPCWVISATHCFIDYPKKEDYIVYLGRSRLNSNTQGEMKFEVENLILHKDYSADTGAQHNDIALLKIRSKEGRCAQPSRTIQTISLPSMYNDPQFGTSCEITGFGKENSTDYLYPEQLKMTVVKLISHRECQQPHYYGSEVTTKMLCAADPQWKTDSCQGDSGGPLVCSLQGRMTLTGIVSWGVGCALKDKPGVYTRVSHFLPWIRSHTKEENGLAL

SEQ ID NO: 386 - protein, 253 aa, Artificial Sequence
  UROKINASE-TYPE PLASMINOGEN ACTIVATOR (u-PA) protease domain R37aS/V41R/L97bG/C122S/R217V
IIGGEFTTIENQPWFAAIYRRHSGGSVTYRCGGSLISPCWVISATHCFIDYPKKEDYIVYLGRSRLNSNTQGEMKFEVENLILHKDYSADTGAHHNDIALLKIRSKEGRCAQPSRTIQTISLPSMYNDPQFGTSCEITGFGKENSTDYLYPEQLKMTVVKLISHRECQQPHYYGSEVTTKMLCAADPQWKTDSCQGDSGGPLVCSLQGRMTLTGIVSWGVGCALKDKPGVYTRVSHFLPWIRSHTKEENGLAL

SEQ ID NO: 387 - protein, 253 aa, Artificial Sequence
  UROKINASE-TYPE PLASMINOGEN ACTIVATOR (u-PA) protease domain Y40H/V41Q/L97bG/H99Q/C122S/R217T
IIGGEFTTIENQPWFAAIYRRHRGGSVTHQCGGSLISPCWVISATHCFIDYPKKEDYIVYLGRSRLNSNTQGEMKFEVENLILHKDYSADTGAQHNDIALLKIRSKEGRCAQPSRTIQTISLPSMYNDPQFGTSCEITGFGKENSTDYLYPEQLKMTVVKLISHRECQQPHYYGSEVTTKMLCAADPQWKTDSCQGDSGGPLVCSLQGRMTLTGIVSWGVGCALKDKPGVYTRVSHFLPWIRSHTKEENGLAL

SEQ ID NO: 388 - protein, 253 aa, Artificial Sequence
  UROKINASE-TYPE PLASMINOGEN ACTIVATOR (u-PA) protease domain Y40H/V41Q/L97bG/C122S/R217T
IIGGEFTTIENQPWFAAIYRRHRGGSVTHQCGGSLISPCWVISATHCFIDYPKKEDYIVYLGRSRLNSNTQGEMKFEVENLILHKDYSADTGAHHNDIALLKIRSKEGRCAQPSRTIQTISLPSMYNDPQFGTSCEITGFGKENSTDYLYPEQLKMTVVKLISHRECQQPHYYGSEVTTKMLCAADPQWKTDSCQGDSGGPLVCSLQGRMTLTGIVSWGVGCALKDKPGVYTRVSHFLPWIRSHTKEENGLAL

SEQ ID NO: 389 - protein, 253 aa, Artificial Sequence
  UROKINASE-TYPE PLASMINOGEN ACTIVATOR (u-PA) protease domain Y40H/V41Q/L97bG/H99Q/C122S
IIGGEFTTIENQPWFAAIYRRHRGGSVTHQCGGSLISPCWVISATHCFIDYPKKEDYIVYLGRSRLNSNTQGEMKFEVENLILHKDYSADTGAQHNDIALLKIRSKEGRCAQPSRTIQTISLPSMYNDPQFGTSCEITGFGKENSTDYLYPEQLKMTVVKLISHRECQQPHYYGSEVTTKMLCAADPQWKTDSCQGDSGGPLVCSLQGRMTLTGIVSWGRGCALKDKPGVYTRVSHFLPWIRSHTKEENGLAL

SEQ ID NO: 390 - protein, 253 aa, Artificial Sequence
  UROKINASE-TYPE PLASMINOGEN ACTIVATOR (u-PA) protease domain Y40H/V41T/L97bG/H99Q/C122S/R217T
IIGGEFTTIENQPWFAAIYRRHRGGSVTHTCGGSLISPCWVISATHCFIDYPKKEDYIVYLGRSRLNSNTQGEMKFEVENLILHKDYSADTGAQHNDIALLKIRSKEGRCAQPSRTIQTISLPSMYNDPQFGTSCEITGFGKENSTDYLYPEQLKMTVVKLISHRECQQPHYYGSEVTTKMLCAADPQWKTDSCQGDSGGPLVCSLQGRMTLTGIVSWGTGCALKDKPGVYTRVSHFLPWIRSHTKEENGLAL

SEQ ID NO: 391 - protein, 253 aa, Artificial Sequence
  UROKINASE-TYPE PLASMINOGEN ACTIVATOR (u-PA) protease domain Y40H/V41T/L97bG/C122S/R217T
IIGGEFTTIENQPWFAAIYRRHRGGSVTHTCGGSLISPCWVISATHCFIDYPKKEDYIVYLGRSRLNSNTQGEMKFEVENLILHKDYSADTGAHHNDIALLKIRSKEGRCAQPSRTIQTISLPSMYNDPQFGTSCEITGFGKENSTDYLYPEQLKMTVVKLISHRECQQPHYYGSEVTTKMLCAADPQWKTDSCQGDSGGPLVCSLQGRMTLTGIVSWGTGCALKDKPGVYTRVSHFLPWIRSHTKEENGLAL

SEQ ID NO: 392 - protein, 253 aa, Artificial Sequence
  UROKINASE-TYPE PLASMINOGEN ACTIVATOR (u-PA) protease domain Y40H/V41T/L97bG/H99Q/C122S
IIGGEFTTIENQPWFAAIYRRHRGGSVTHTCGGSLISPCWVISATHCFIDYPKKEDYIVYLGRSRLNSNTQGEMKFEVENLILHKDYSADTGAQHNDIALLKIRSKEGRCAQPSRTIQTISLPSMYNDPQFGTSCEITGFGKENSTDYLYPEQLKMTVVKLISHRECQQPHYYGSEVTTKMLCAADPQWKTDSCQGDSGGPLVCSLQGRMTLTGIVSWGRGCALKDKPGVYTRVSHFLPWIRSHTKEENGLAL

SEQ ID NO: 393 - protein, 253 aa, Artificial Sequence
  UROKINASE-TYPE PLASMINOGEN ACTIVATOR (u-PA) protease domain V41R/L97bG/H99Q/C122S
IIGGEFTTIENQPWFAAIYRRHRGGSVTYRCGGSLISPCWVISATHCFIDYPKKEDYIVYLGRSRLNSNTQGEMKFEVENLILHKDYSADTGAQHNDIALLKIRSKEGRCAQPSRTIQTISLPSMYNDPQFGTSCEITGFGKENSTDYLYPEQLKMTVVKLISHRECQQPHYYGSEVTTKMLCAADPQWKTDSCQGDSGGPLVCSLQGRMTLTGIVSWGRGCALKDKPGVYTRVSHFLPWIRSHTKEENGLAL

SEQ ID NO: 394 - protein, 253 aa, Artificial Sequence
  UROKINASE-TYPE PLASMINOGEN ACTIVATOR (u-PA) protease domain V41Q/L97bG/H99Q/C122S
IIGGEFTTIENQPWFAAIYRRHRGGSVTYQCGGSLISPCWVISATHCFIDYPKKEDYIVYLGRSRLNSNTQGEMKFEVENLILHKDYSADTGAQHNDIALLKIRSKEGRCAQPSRTIQTISLPSMYNDPQFGTSCEITGFGKENSTDYLYPEQLKMTVVKLISHRECQQPHYYGSEVTTKMLCAADPQWKTDSCQGDSGGPLVCSLQGRMTLTGIVSWGRGCALKDKPGVYTRVSHFLPWIRSHTKEENGLAL

SEQ ID NO: 395 - protein, 253 aa, Artificial Sequence
  UROKINASE-TYPE PLASMINOGEN ACTIVATOR (u-PA) protease domain V41T/L97bG/H99Q/C122S
IIGGEFTTIENQPWFAAIYRRHRGGSVTYTCGGSLISPCWVISATHCFIDYPKKEDYIVYLGRSRLNSNTQGEMKFEVENLILHKDYSADTGAQHNDIALLKIRSKEGRCAQPSRTIQTISLPSMYNDPQFGTSCEITGFGKENSTDYLYPEQLKMTVVKLISHRECQQPHYYGSEVTTKMLCAADPQWKTDSCQGDSGGPLVCSLQGRMTLTGIVSWGRGCALKDKPGVYTRVSHFLPWIRSHTKEENGLAL

SEQ ID NO: 396 - protein, 253 aa, Artificial Sequence
  UROKINASE-TYPE PLASMINOGEN ACTIVATOR (u-PA) protease domain T39Y/V41R/L97bA/C122S
IIGGEFTTIENQPWFAAIYRRHRGGSVYYRCGGSLISPCWVISATHCFIDYPKKEDYIVYLGRSRLNSNTQGEMKFEVENLILHKDYSADTAAHHNDIALLKIRSKEGRCAQPSRTIQTISLPSMYNDPQFGTSCEITGFGKENSTDYLYPEQLKMTVVKLISHRECQQPHYYGSEVTTKMLCAADPQWKTDSCQGDSGGPLVCSLQGRMTLTGIVSWGRGCALKDKPGVYTRVSHFLPWIRSHTKEENGLAL

SEQ ID NO: 397 - protein, 253 aa, Artificial Sequence
  UROKINASE-TYPE PLASMINOGEN ACTIVATOR (u-PA) protease domain T39Y/V41R/Y60bQ/L97bA/C122S
IIGGEFTTIENQPWFAAIYRRHRGGSVYYRCGGSLISPCWVISATHCFIDQPKKEDYIVYLGRSRLNSNTQGEMKFEVENLILHKDYSADTAAHHNDIALLKIRSKEGRCAQPSRTIQTISLPSMYNDPQFGTSCEITGFGKENSTDYLYPEQLKMTVVKLISHRECQQPHYYGSEVTTKMLCAADPQWKTDSCQGDSGGPLVCSLQGRMTLTGIVSWGRGCALKDKPGVYTRVSHFLPWIRSHTKEENGLAL

SEQ ID NO: 398 - protein, 253 aa, Artificial Sequence
  UROKINASE-TYPE PLASMINOGEN ACTIVATOR (u-PA) protease domain T39Y/V41R/D60aP/Y60bQ/L97bA/H99Q/C122S
IIGGEFTTIENQPWFAAIYRRHRGGSVYYRCGGSLISPCWVISATHCFIPQPKKEDYIVYLGRSRLNSNTQGEMKFEVENLILHKDYSADTAAQHNDIALLKIRSKEGRCAQPSRTIQTISLPSMYNDPQFGTSCEITGFGKENSTDYLYPEQLKMTVVKLISHRECQQPHYYGSEVTTKMLCAADPQWKTDSCQGDSGGPLVCSLQGRMTLTGIVSWGRGCALKDKPGVYTRVSHFLPWIRSHTKEENGLAL

SEQ ID NO: 399 - protein, 253 aa, Artificial Sequence
  UROKINASE-TYPE PLASMINOGEN ACTIVATOR (u-PA) protease domain T39Y/V41R/L97bG/H99Q/C122S
IIGGEFTTIENQPWFAAIYRRHRGGSVYYRCGGSLISPCWVISATHCFIDYPKKEDYIVYLGRSRLNSNTQGEMKFEVENLILHKDYSADTGAQHNDIALLKIRSKEGRCAQPSRTIQTISLPSMYNDPQFGTSCEITGFGKENSTDYLYPEQLKMTVVKLISHRECQQPHYYGSEVTTKMLCAADPQWKTDSCQGDSGGPLVCSLQGRMTLTGIVSWGRGCALKDKPGVYTRVSHFLPWIRSHTKEENGLAL

SEQ ID NO: 400 - protein, 253 aa, Artificial Sequence
  UROKINASE-TYPE PLASMINOGEN ACTIVATOR (u-PA) protease domain T39H/V41R/L97bG/H99Q/C122S
IIGGEFTTIENQPWFAAIYRRHRGGSVHYRCGGSLISPCWVISATHCFIDYPKKEDYIVYLGRSRLNSNTQGEMKFEVENLILHKDYSADTGAQHNDIALLKIRSKEGRCAQPSRTIQTISLPSMYNDPQFGTSCEITGFGKENSTDYLYPEQLKMTVVKLISHRECQQPHYYGSEVTTKMLCAADPQWKTDSCQGDSGGPLVCSLQGRMTLTGIVSWGRGCALKDKPGVYTRVSHFLPWIRSHTKEENGLAL

SEQ ID NO: 401 - protein, 253 aa, Artificial Sequence
  UROKINASE-TYPE PLASMINOGEN ACTIVATOR (u-PA) protease domain T39W/V41R/L97bG/H99Q/C122S
IIGGEFTTIENQPWFAAIYRRHRGGSVWYRCGGSLISPCWVISATHCFIDYPKKEDYIVYLGRSRLNSNTQGEMKFEVENLILHKDYSADTGAQHNDIALLKIRSKEGRCAQPSRTIQTISLPSMYNDPQFGTSCEITGFGKENSTDYLYPEQLKMTVVKLISHRECQQPHYYGSEVTTKMLCAADPQWKTDSCQGDSGGPLVCSLQGRMTLTGIVSWGRGCALKDKPGVYTRVSHFLPWIRSHTKEENGLAL

SEQ ID NO: 402 - protein, 253 aa, Artificial Sequence
  UROKINASE-TYPE PLASMINOGEN ACTIVATOR (u-PA) protease domain T39Y/V41R/Y60bQ/L97bG/H99Q/C122S
IIGGEFTTIENQPWFAAIYRRHRGGSVYYRCGGSLISPCWVISATHCFIDQPKKEDYIVYLGRSRLNSNTQGEMKFEVENLILHKDYSADTGAQHNDIALLKIRSKEGRCAQPSRTIQTISLPSMYNDPQFGTSCEITGFGKENSTDYLYPEQLKMTVVKLISHRECQQPHYYGSEVTTKMLCAADPQWKTDSCQGDSGGPLVCSLQGRMTLTGIVSWGRGCALKDKPGVYTRVSHFLPWIRSHTKEENGLAL

SEQ ID NO: 403 - protein, 253 aa, Artificial Sequence
  UROKINASE-TYPE PLASMINOGEN ACTIVATOR (u-PA) protease domain T39Y/V41R/Y60bP/L97bA/H99Q/C122S
IIGGEFTTIENQPWFAAIYRRHRGGSVYYRCGGSLISPCWVISATHCFIDPPKKEDYIVYLGRSRLNSNTQGEMKFEVENLILHKDYSADTAAQHNDIALLKIRSKEGRCAQPSRTIQTISLPSMYNDPQFGTSCEITGFGKENSTDYLYPEQLKMTVVKLISHRECQQPHYYGSEVTTKMLCAADPQWKTDSCQGDSGGPLVCSLQGRMTLTGIVSWGRGCALKDKPGVYTRVSHFLPWIRSHTKEENGLAL

SEQ ID NO: 404 - protein, 253 aa, Artificial Sequence
  UROKINASE-TYPE PLASMINOGEN ACTIVATOR (u-PA) protease domain T39Y/V41R/Y60bP/L97bG/H99Q/C122S
IIGGEFTTIENQPWFAAIYRRHRGGSVYYRCGGSLISPCWVISATHCFIDPPKKEDYIVYLGRSRLNSNTQGEMKFEVENLILHKDYSADTGAQHNDIALLKIRSKEGRCAQPSRTIQTISLPSMYNDPQFGTSCEITGFGKENSTDYLYPEQLKMTVVKLISHRECQQPHYYGSEVTTKMLCAADPQWKTDSCQGDSGGPLVCSLQGRMTLTGIVSWGRGCALKDKPGVYTRVSHFLPWIRSHTKEENGLAL

SEQ ID NO: 405 - protein, 251 aa, Artificial Sequence
  UROKINASE-TYPE PLASMINOGEN ACTIVATOR (u-PA) protease domain V38D/V41S/A96_T97adelinsERG/A98_H99del/C122S/E175A
IIGGEFTTIENQPWFAAIYRRHRGGSDTYSCGGSLISPCWVISATHCFIDYPKKEDYIVYLGRSRLNSNTQGEMKFEVENLILHKDYSERGLHNDIALLKIRSKEGRCAQPSRTIQTISLPSMYNDPQFGTSCEITGFGKENSTDYLYPEQLKMTVVKLISHRECQQPHYYGSAVTTKMLCAADPQWKTDSCQGDSGGPLVCSLQGRMTLTGIVSWGRGCALKDKPGVYTRVSHFLPWIRSHTKEENGLAL

SEQ ID NO: 406 - protein, 251 aa, Artificial Sequence
  UROKINASE-TYPE PLASMINOGEN ACTIVATOR (u-PA) protease domain V38D/V41S/A96D/D97E/T97aG/A98_H99del/C122S/E175S
IIGGEFTTIENQPWFAAIYRRHRGGSDTYSCGGSLISPCWVISATHCFIDYPKKEDYIVYLGRSRLNSNTQGEMKFEVENLILHKDYSDEGLHNDIALLKIRSKEGRCAQPSRTIQTISLPSMYNDPQFGTSCEITGFGKENSTDYLYPEQLKMTVVKLISHRECQQPHYYGSSVTTKMLCAADPQWKTDSCQGDSGGPLVCSLQGRMTLTGIVSWGRGCALKDKPGVYTRVSHFLPWIRSHTKEENGLAL

SEQ ID NO: 407 - protein, 251 aa, Artificial Sequence
  UROKINASE-TYPE PLASMINOGEN ACTIVATOR (u-PA) protease domain V38D/V41S/A96E/D97E/T97aG/A98_H99del/C122S/E175K
IIGGEFTTIENQPWFAAIYRRHRGGSDTYSCGGSLISPCWVISATHCFIDYPKKEDYIVYLGRSRLNSNTQGEMKFEVENLILHKDYSEEGLHNDIALLKIRSKEGRCAQPSRTIQTISLPSMYNDPQFGTSCEITGFGKENSTDYLYPEQLKMTVVKLISHRECQQPHYYGSKVTTKMLCAADPQWKTDSCQGDSGGPLVCSLQGRMTLTGIVSWGRGCALKDKPGVYTRVSHFLPWIRSHTKEENGLAL

SEQ ID NO: 408 - protein, 251 aa, Artificial Sequence
  UROKINASE-TYPE PLASMINOGEN ACTIVATOR (u-PA) protease domain V38D/V41A/A96_T97adelinsERG/A98_H99del/C122S/E175N
IIGGEFTTIENQPWFAAIYRRHRGGSDTYACGGSLISPCWVISATHCFIDYPKKEDYIVYLGRSRLNSNTQGEMKFEVENLILHKDYSERGLHNDIALLKIRSKEGRCAQPSRTIQTISLPSMYNDPQFGTSCEITGFGKENSTDYLYPEQLKMTVVKLISHRECQQPHYYGSNVTTKMLCAADPQWKTDSCQGDSGGPLVCSLQGRMTLTGIVSWGRGCALKDKPGVYTRVSHFLPWIRSHTKEENGLAL

SEQ ID NO: 409 - protein, 251 aa, Artificial Sequence
  UROKINASE-TYPE PLASMINOGEN ACTIVATOR (u-PA) protease domain V38D/V41T/A96E/D97E/T97aG/A98_H99del/C122S/E175K/R 217H
IIGGEFTTIENQPWFAAIYRRHRGGSDTYTCGGSLISPCWVISATHCFIDYPKKEDYIVYLGRSRLNSNTQGEMKFEVENLILHKDYSEEGLHNDIALLKIRSKEGRCAQPSRTIQTISLPSMYNDPQFGTSCEITGFGKENSTDYLYPEQLKMTVVKLISHRECQQPHYYGSKVTTKMLCAADPQWKTDSCQGDSGGPLVCSLQGRMTLTGIVSWGHGCALKDKPGVYTRVSHFLPWIRSHTKEENGLAL

SEQ ID NO: 410 - protein, 251 aa, Artificial Sequence
  UROKINASE-TYPE PLASMINOGEN ACTIVATOR (u-PA) protease domain R35K/V38D/T39S/Y40F/V41M/D60aN/A96D/D97L/A98K/T97a del/H99L/L97bdel/C122S/Y151L
IIGGEFTTIENQPWFAAIYKRHRGGSDSFMCGGSLISPCWVISATHCFINYPKKEDYIVYLGRSRLNSNTQGEMKFEVENLILHKDYSDLKLHNDIALLKIRSKEGRCAQPSRTIQTISLPSMYNDPQFGTSCEITGFGKENSTDYLLPEQLKMTVVKLISHRECQQPHYYGSEVTTKMLCAADPQWKTDSCQGDSGGPLVCSLQGRMTLTGIVSWGRGCALKDKPGVYTRVSHFLPWIRSHTKEENGLAL

SEQ ID NO: 411 - protein, 252 aa, Artificial Sequence
  UROKINASE-TYPE PLASMINOGEN ACTIVATOR (u-PA) protease domain V38D/V41R/A96E/D97G/T97adelinsSG/A98_H99del/C122S
IIGGEFTTIENQPWFAAIYRRHRGGSDTYRCGGSLISPCWVISATHCFIDYPKKEDYIVYLGRSRLNSNTQGEMKFEVENLILHKDYSEGSGLHNDIALLKIRSKEGRCAQPSRTIQTISLPSMYNDPQFGTSCEITGFGKENSTDYLYPEQLKMTVVKLISHRECQQPHYYGSEVTTKMLCAADPQWKTDSCQGDSGGPLVCSLQGRMTLTGIVSWGRGCALKDKPGVYTRVSHFLPWIRSHTKEENGLAL

SEQ ID NO: 412 - protein, 253 aa, Artificial Sequence
  UROKINASE-TYPE PLASMINOGEN ACTIVATOR (u-PA) protease domain V38D/L97bG/H99P/C122S/R217V/K224Q
IIGGEFTTIENQPWFAAIYRRHRGGSDTYVCGGSLISPCWVISATHCFIDYPKKEDYIVYLGRSRLNSNTQGEMKFEVENLILHKDYSADTGAPHNDIALLKIRSKEGRCAQPSRTIQTISLPSMYNDPQFGTSCEITGFGKENSTDYLYPEQLKMTVVKLISHRECQQPHYYGSEVTTKMLCAADPQWKTDSCQGDSGGPLVCSLQGRMTLTGIVSWGVGCALKDQPGVYTRVSHFLPWIRSHTKEENGLAL

SEQ ID NO: 413 - protein, 251 aa, Artificial Sequence
  UROKINASE-TYPE PLASMINOGEN ACTIVATOR (u-PA) protease domain V38D/A96G/D97R/A98G/T97adel/H99I/L97bdel/C122S
IIGGEFTTIENQPWFAAIYRRHRGGSDTYVCGGSLISPCWVISATHCFIDYPKKEDYIVYLGRSRLNSNTQGEMKFEVENLILHKDYSGRGIHNDIALLKIRSKEGRCAQPSRTIQTISLPSMYNDPQFGTSCEITGFGKENSTDYLYPEQLKMTVVKLISHRECQQPHYYGSEVTTKMLCAADPQWKTDSCQGDSGGPLVCSLQGRMTLTGIVSWGRGCALKDKPGVYTRVSHFLPWIRSHTKEENGLAL

SEQ ID NO: 414 - protein, 251 aa, Artificial Sequence
  UROKINASE-TYPE PLASMINOGEN ACTIVATOR (u-PA) protease domain V38D/A96E/D97E/T97aG/A98_H99del/L97bM/C122S
IIGGEFTTIENQPWFAAIYRRHRGGSDTYVCGGSLISPCWVISATHCFIDYPKKEDYIVYLGRSRLNSNTQGEMKFEVENLILHKDYSEEGMHNDIALLKIRSKEGRCAQPSRTIQTISLPSMYNDPQFGTSCEITGFGKENSTDYLYPEQLKMTVVKLISHRECQQPHYYGSEVTTKMLCAADPQWKTDSCQGDSGGPLVCSLQGRMTLTGIVSWGRGCALKDKPGVYTRVSHFLPWIRSHTKEENGLAL

SEQ ID NO: 415 - protein, 252 aa, Artificial Sequence
  UROKINASE-TYPE PLASMINOGEN ACTIVATOR (u-PA) protease domain V38D/V41R/A96D/D97G/T97aN/A98G/L97bdel/H99L/C122S/ R217F
IIGGEFTTIENQPWFAAIYRRHRGGSDTYRCGGSLISPCWVISATHCFIDYPKKEDYIVYLGRSRLNSNTQGEMKFEVENLILHKDYSDGNGLHNDIALLKIRSKEGRCAQPSRTIQTISLPSMYNDPQFGTSCEITGFGKENSTDYLYPEQLKMTVVKLISHRECQQPHYYGSEVTTKMLCAADPQWKTDSCQGDSGGPLVCSLQGRMTLTGIVSWGFGCALKDKPGVYTRVSHFLPWIRSHTKEENGLAL

SEQ ID NO: 416 - protein, 251 aa, Artificial Sequence
  UROKINASE-TYPE PLASMINOGEN ACTIVATOR (u-PA) protease domain V38D/V41Q/A96E/D97E/T97aG/A98_H99del/C122S/R217H
IIGGEFTTIENQPWFAAIYRRHRGGSDTYQCGGSLISPCWVISATHCFIDYPKKEDYIVYLGRSRLNSNTQGEMKFEVENLILHKDYSEEGLHNDIALLKIRSKEGRCAQPSRTIQTISLPSMYNDPQFGTSCEITGFGKENSTDYLYPEQLKMTVVKLISHRECQQPHYYGSEVTTKMLCAADPQWKTDSCQGDSGGPLVCSLQGRMTLTGIVSWGHGCALKDKPGVYTRVSHFLPWIRSHTKEENGLAL

SEQ ID NO: 417 - protein, 251 aa, Artificial Sequence
  UROKINASE-TYPE PLASMINOGEN ACTIVATOR (u-PA) protease domain V38D/V41R/A96D/D97G/A98G/T97adel/H99L/L97bdel/C122 S/R217D
IIGGEFTTIENQPWFAAIYRRHRGGSDTYRCGGSLISPCWVISATHCFIDYPKKEDYIVYLGRSRLNSNTQGEMKFEVENLILHKDYSDGGLHNDIALLKIRSKEGRCAQPSRTIQTISLPSMYNDPQFGTSCEITGFGKENSTDYLYPEQLKMTVVKLISHRECQQPHYYGSEVTTKMLCAADPQWKTDSCQGDSGGPLVCSLQGRMTLTGIVSWGDGCALKDKPGVYTRVSHFLPWIRSHTKEENGLAL

SEQ ID NO: 418 - protein, 251 aa, Artificial Sequence
  UROKINASE-TYPE PLASMINOGEN ACTIVATOR (u-PA) protease domain V38D/V41K/A96D/D97E/T97aG/A98_H99del/C122S/R217K/K 224N
IIGGEFTTIENQPWFAAIYRRHRGGSDTYKCGGSLISPCWVISATHCFIDYPKKEDYIVYLGRSRLNSNTQGEMKFEVENLILHKDYSDEGLHNDIALLKIRSKEGRCAQPSRTIQTISLPSMYNDPQFGTSCEITGFGKENSTDYLYPEQLKMTVVKLISHRECQQPHYYGSEVTTKMLCAADPQWKTDSCQGDSGGPLVCSLQGRMTLTGIVSWGKGCALKDNPGVYTRVSHFLPWIRSHTKEENGLAL

SEQ ID NO: 419 - protein, 251 aa, Artificial Sequence
  UROKINASE-TYPE PLASMINOGEN ACTIVATOR (u-PA) protease domain R36H/V38D/V41M/D97E/A98G/T97adel/H99L/L97bdel/C122 S/R217D
IIGGEFTTIENQPWFAAIYRHHRGGSDTYMCGGSLISPCWVISATHCFIDYPKKEDYIVYLGRSRLNSNTQGEMKFEVENLILHKDYSAEGLHNDIALLKIRSKEGRCAQPSRTIQTISLPSMYNDPQFGTSCEITGFGKENSTDYLYPEQLKMTVVKLISHRECQQPHYYGSEVTTKMLCAADPQWKTDSCQGDSGGPLVCSLQGRMTLTGIVSWGDGCALKDKPGVYTRVSHFLPWIRSHTKEENGLAL

SEQ ID NO: 420 - protein, 251 aa, Artificial Sequence
  UROKINASE-TYPE PLASMINOGEN ACTIVATOR (u-PA) protease domain V38D/V41H/A96D/D97E/T97aG/A98_H99del/C122S/R217del insF
IIGGEFTTIENQPWFAAIYRRHRGGSDTYHCGGSLISPCWVISATHCFIDYPKKEDYIVYLGRSRLNSNTQGEMKFEVENLILHKDYSDEGLHNDIALLKIRSKEGRCAQPSRTIQTISLPSMYNDPQFGTSCEITGFGKENSTDYLYPEQLKMTVVKLISHRECQQPHYYGSEVTTKMLCAADPQWKTDSCQGDSGGPLVCSLQGRMTLTGIVSWGFGCALKDKPGVYTRVSHFLPWIRSHTKEENGLAL

SEQ ID NO: 421 - protein, 251 aa, Artificial Sequence
  UROKINASE-TYPE PLASMINOGEN ACTIVATOR (u-PA) protease domain V38D/D97E/T97aG/A98_H99del/C122S/E175G/R217H
IIGGEFTTIENQPWFAAIYRRHRGGSDTYVCGGSLISPCWVISATHCFIDYPKKEDYIVYLGRSRLNSNTQGEMKFEVENLILHKDYSAEGLHNDIALLKIRSKEGRCAQPSRTIQTISLPSMYNDPQFGTSCEITGFGKENSTDYLYPEQLKMTVVKLISHRECQQPHYYGSGVTTKMLCAADPQWKTDSCQGDSGGPLVCSLQGRMTLTGIVSWGHGCALKDKPGVYTRVSHFLPWIRSHTKEENGLAL

SEQ ID NO: 422 - protein, 253 aa, Artificial Sequence
  UROKINASE-TYPE PLASMINOGEN ACTIVATOR (u-PA) protease domain A32S/V38D/H99E/C122S/K224A
IIGGEFTTIENQPWFASIYRRHRGGSDTYVCGGSLISPCWVISATHCFIDYPKKEDYIVYLGRSRLNSNTQGEMKFEVENLILHKDYSADTLAEHNDIALLKIRSKEGRCAQPSRTIQTISLPSMYNDPQFGTSCEITGFGKENSTDYLYPEQLKMTVVKLISHRECQQPHYYGSEVTTKMLCAADPQWKTDSCQGDSGGPLVCSLQGRMTLTGIVSWGRGCALKDAPGVYTRVSHFLPWIRSHTKEENGLAL

SEQ ID NO: 423 - protein, 253 aa, Artificial Sequence
  UROKINASE-TYPE PLASMINOGEN ACTIVATOR (u-PA) protease domain V38D/L97bA/H99Q/C122S
IIGGEFTTIENQPWFAAIYRRHRGGSDTYVCGGSLISPCWVISATHCFIDYPKKEDYIVYLGRSRLNSNTQGEMKFEVENLILHKDYSADTAAQHNDIALLKIRSKEGRCAQPSRTIQTISLPSMYNDPQFGTSCEITGFGKENSTDYLYPEQLKMTVVKLISHRECQQPHYYGSEVTTKMLCAADPQWKTDSCQGDSGGPLVCSLQGRMTLTGIVSWGRGCALKDKPGVYTRVSHFLPWIRSHTKEENGLAL

SEQ ID NO: 424 - protein, 253 aa, Artificial Sequence
  UROKINASE-TYPE PLASMINOGEN ACTIVATOR (u-PA) protease domain R36S/V38D/L97bR/H99E/C122S/R217D/K224R
IIGGEFTTIENQPWFAAIYRSHRGGSDTYVCGGSLISPCWVISATHCFIDYPKKEDYIVYLGRSRLNSNTQGEMKFEVENLILHKDYSADTRAEHNDIALLKIRSKEGRCAQPSRTIQTISLPSMYNDPQFGTSCEITGFGKENSTDYLYPEQLKMTVVKLISHRECQQPHYYGSEVTTKMLCAADPQWKTDSCQGDSGGPLVCSLQGRMTLTGIVSWGDGCALKDRPGVYTRVSHFLPWIRSHTKEENGLAL

SEQ ID NO: 425 - protein, 252 aa, Artificial Sequence
  UROKINASE-TYPE PLASMINOGEN ACTIVATOR (u-PA) protease domain V38D/V41Q/A96N/D97G/T97aI/A98G/L97bdel/H99L/C122S
IIGGEFTTIENQPWFAAIYRRHRGGSDTYQCGGSLISPCWVISATHCFIDYPKKEDYIVYLGRSRLNSNTQGEMKFEVENLILHKDYSNGIGLHNDIALLKIRSKEGRCAQPSRTIQTISLPSMYNDPQFGTSCEITGFGKENSTDYLYPEQLKMTVVKLISHRECQQPHYYGSEVTTKMLCAADPQWKTDSCQGDSGGPLVCSLQGRMTLTGIVSWGRGCALKDKPGVYTRVSHFLPWIRSHTKEENGLAL

SEQ ID NO: 426 - protein, 251 aa, Artificial Sequence
  UROKINASE-TYPE PLASMINOGEN ACTIVATOR (u-PA) protease domain R35S/V38D/V41T/A96D/D97G/A98G/T97adel/H99L/L97bdel /C122S
IIGGEFTTIENQPWFAAIYSRHRGGSDTYTCGGSLISPCWVISATHCFIDYPKKEDYIVYLGRSRLNSNTQGEMKFEVENLILHKDYSDGGLHNDIALLKIRSKEGRCAQPSRTIQTISLPSMYNDPQFGTSCEITGFGKENSTDYLYPEQLKMTVVKLISHRECQQPHYYGSEVTTKMLCAADPQWKTDSCQGDSGGPLVCSLQGRMTLTGIVSWGRGCALKDKPGVYTRVSHFLPWIRSHTKEENGLAL

SEQ ID NO: 427 - protein, 251 aa, Artificial Sequence
  UROKINASE-TYPE PLASMINOGEN ACTIVATOR (u-PA) protease domain V38D/V41K/A96K/D97E/A98G/T97adel/H99L/L97bdel/C122 S
IIGGEFTTIENQPWFAAIYRRHRGGSDTYKCGGSLISPCWVISATHCFIDYPKKEDYIVYLGRSRLNSNTQGEMKFEVENLILHKDYSKEGLHNDIALLKIRSKEGRCAQPSRTIQTISLPSMYNDPQFGTSCEITGFGKENSTDYLYPEQLKMTVVKLISHRECQQPHYYGSEVTTKMLCAADPQWKTDSCQGDSGGPLVCSLQGRMTLTGIVSWGRGCALKDKPGVYTRVSHFLPWIRSHTKEENGLAL

SEQ ID NO: 428 - protein, 251 aa, Artificial Sequence
  UROKINASE-TYPE PLASMINOGEN ACTIVATOR (u-PA) protease domain R36H/V38D/V41S/A96E/D97R/A98G/T97adel/H99L/L97bdel /C122S/K224R
IIGGEFTTIENQPWFAAIYRHHRGGSDTYSCGGSLISPCWVISATHCFIDYPKKEDYIVYLGRSRLNSNTQGEMKFEVENLILHKDYSERGLHNDIALLKIRSKEGRCAQPSRTIQTISLPSMYNDPQFGTSCEITGFGKENSTDYLYPEQLKMTVVKLISHRECQQPHYYGSEVTTKMLCAADPQWKTDSCQGDSGGPLVCSLQGRMTLTGIVSWGRGCALKDRPGVYTRVSHFLPWIRSHTKEENGLAL

SEQ ID NO: 429 - protein, 251 aa, Artificial Sequence
  UROKINASE-TYPE PLASMINOGEN ACTIVATOR (u-PA) protease domain V38D/V41R/A96D/D97G/A98G/T97adel/H99L/L97bdel/C122 S/Y151L/Q192D/R217D
IIGGEFTTIENQPWFAAIYRRHRGGSDTYRCGGSLISPCWVISATHCFIDYPKKEDYIVYLGRSRLNSNTQGEMKFEVENLILHKDYSDGGLHNDIALLKIRSKEGRCAQPSRTIQTISLPSMYNDPQFGTSCEITGFGKENSTDYLLPEQLKMTVVKLISHRECQQPHYYGSEVTTKMLCAADPQWKTDSCDGDSGGPLVCSLQGRMTLTGIVSWGDGCALKDKPGVYTRVSHFLPWIRSHTKEENGLAL

SEQ ID NO: 430 - protein, 251 aa, Artificial Sequence
  UROKINASE-TYPE PLASMINOGEN ACTIVATOR (u-PA) protease domain V38D/V41R/A96D/D97G/A98G/T97adel/H99L/L97bdel/C122 S/Y151M/Q192E/R217D
IIGGEFTTIENQPWFAAIYRRHRGGSDTYRCGGSLISPCWVISATHCFIDYPKKEDYIVYLGRSRLNSNTQGEMKFEVENLILHKDYSDGGLHNDIALLKIRSKEGRCAQPSRTIQTISLPSMYNDPQFGTSCEITGFGKENSTDYLMPEQLKMTVVKLISHRECQQPHYYGSEVTTKMLCAADPQWKTDSCEGDSGGPLVCSLQGRMTLTGIVSWGDGCALKDKPGVYTRVSHFLPWIRSHTKEENGLAL

SEQ ID NO: 431 - protein, 251 aa, Artificial Sequence
  UROKINASE-TYPE PLASMINOGEN ACTIVATOR (u-PA) protease domain V38D/V41R/A96D/D97G/A98G/T97adel/H99L/L97bdel/C122 S/Y151K/Q192E/R217D
IIGGEFTTIENQPWFAAIYRRHRGGSDTYRCGGSLISPCWVISATHCFIDYPKKEDYIVYLGRSRLNSNTQGEMKFEVENLILHKDYSDGGLHNDIALLKIRSKEGRCAQPSRTIQTISLPSMYNDPQFGTSCEITGFGKENSTDYLKPEQLKMTVVKLISHRECQQPHYYGSEVTTKMLCAADPQWKTDSCEGDSGGPLVCSLQGRMTLTGIVSWGDGCALKDKPGVYTRVSHFLPWIRSHTKEENGLAL

SEQ ID NO: 432 - protein, 251 aa, Artificial Sequence
  UROKINASE-TYPE PLASMINOGEN ACTIVATOR (u-PA) protease domain R36H/V38D/V41R/A96D/D97G/T97adel/A98G/L97bdel/H99L /C122S/Y151F/Q192D/R217D
IIGGEFTTIENQPWFAAIYRHHRGGSDTYRCGGSLISPCWVISATHCFIDYPKKEDYIVYLGRSRLNSNTQGEMKFEVENLILHKDYSDGGLHNDIALLKIRSKEGRCAQPSRTIQTISLPSMYNDPQFGTSCEITGFGKENSTDYLFPEQLKMTVVKLISHRECQQPHYYGSEVTTKMLCAADPQWKTDSCDGDSGGPLVCSLQGRMTLTGIVSWGDGCALKDKPGVYTRVSHFLPWIRSHTKEENGLAL

SEQ ID NO: 433 - protein, 251 aa, Artificial Sequence
  UROKINASE-TYPE PLASMINOGEN ACTIVATOR (u-PA) protease domain V38D/V41R/A96D/D97G/A98G/T97adel/H99L/L97bdel/C122 S/Y151W/Q192M/R217D
IIGGEFTTIENQPWFAAIYRRHRGGSDTYRCGGSLISPCWVISATHCFIDYPKKEDYIVYLGRSRLNSNTQGEMKFEVENLILHKDYSDGGLHNDIALLKIRSKEGRCAQPSRTIQTISLPSMYNDPQFGTSCEITGFGKENSTDYLWPEQLKMTVVKLISHRECQQPHYYGSEVTTKMLCAADPQWKTDSCMGDSGGPLVCSLQGRMTLTGIVSWGDGCALKDKPGVYTRVSHFLPWIRSHTKEENGLAL

SEQ ID NO: 434 - protein, 251 aa, Artificial Sequence
  UROKINASE-TYPE PLASMINOGEN ACTIVATOR (u-PA) protease domain R37aH/V38D/V41R/A96D/D97G/A98G/T97adel/H99L/L97bde l/C122S/Y151L/Q192G/R217D
IIGGEFTTIENQPWFAAIYRRHHGGSDTYRCGGSLISPCWVISATHCFIDYPKKEDYIVYLGRSRLNSNTQGEMKFEVENLILHKDYSDGGLHNDIALLKIRSKEGRCAQPSRTIQTISLPSMYNDPQFGTSCEITGFGKENSTDYLLPEQLKMTVVKLISHRECQQPHYYGSEVTTKMLCAADPQWKTDSCGGDSGGPLVCSLQGRMTLTGIVSWGDGCALKDKPGVYTRVSHFLPWIRSHTKEENGLAL

SEQ ID NO: 435 - protein, 251 aa, Artificial Sequence
  UROKINASE-TYPE PLASMINOGEN ACTIVATOR (u-PA) protease domain V38D/Y40P/V41R/A96D/D97G/A98G/T97adel/H99L/L97bdel /C122S/Q192L/R217D
IIGGEFTTIENQPWFAAIYRRHRGGSDTPRCGGSLISPCWVISATHCFIDYPKKEDYIVYLGRSRLNSNTQGEMKFEVENLILHKDYSDGGLHNDIALLKIRSKEGRCAQPSRTIQTISLPSMYNDPQFGTSCEITGFGKENSTDYLYPEQLKMTVVKLISHRECQQPHYYGSEVTTKMLCAADPQWKTDSCLGDSGGPLVCSLQGRMTLTGIVSWGDGCALKDKPGVYTRVSHFLPWIRSHTKEENGLAL

SEQ ID NO: 436 - protein, 251 aa, Artificial Sequence
  UROKINASE-TYPE PLASMINOGEN ACTIVATOR (u-PA) protease domain V38D/V41R/A96D/D97G/A98G/T97adel/H99L/L97bdel/C122 S/Y151L/Q192E/R217D
IIGGEFTTIENQPWFAAIYRRHRGGSDTYRCGGSLISPCWVISATHCFIDYPKKEDYIVYLGRSRLNSNTQGEMKFEVENLILHKDYSDGGLHNDIALLKIRSKEGRCAQPSRTIQTISLPSMYNDPQFGTSCEITGFGKENSTDYLLPEQLKMTVVKLISHRECQQPHYYGSEVTTKMLCAADPQWKTDSCEGDSGGPLVCSLQGRMTLTGIVSWGDGCALKDKPGVYTRVSHFLPWIRSHTKEENGLAL

SEQ ID NO: 437 - protein, 251 aa, Artificial Sequence
  UROKINASE-TYPE PLASMINOGEN ACTIVATOR (u-PA) protease domain V38D/V41R/A96D/D97G/A98G/T97adel/H99L/L97bdel/C122 S/Y151N/Q192M/R217D
IIGGEFTTIENQPWFAAIYRRHRGGSDTYRCGGSLISPCWVISATHCFIDYPKKEDYIVYLGRSRLNSNTQGEMKFEVENLILHKDYSDGGLHNDIALLKIRSKEGRCAQPSRTIQTISLPSMYNDPQFGTSCEITGFGKENSTDYLNPEQLKMTVVKLISHRECQQPHYYGSEVTTKMLCAADPQWKTDSCMGDSGGPLVCSLQGRMTLTGIVSWGDGCALKDKPGVYTRVSHFLPWIRSHTKEENGLAL

SEQ ID NO: 438 - protein, 251 aa, Artificial Sequence
  UROKINASE-TYPE PLASMINOGEN ACTIVATOR (u-PA) protease domain R36H/V38D/Y40F/V41R/D97E/A98G/T97adel/H99L/L97bdel /C122S/Y151L/Q192D/R217D
IIGGEFTTIENQPWFAAIYRHHRGGSDTFRCGGSLISPCWVISATHCFIDYPKKEDYIVYLGRSRLNSNTQGEMKFEVENLILHKDYSAEGLHNDIALLKIRSKEGRCAQPSRTIQTISLPSMYNDPQFGTSCEITGFGKENSTDYLLPEQLKMTVVKLISHRECQQPHYYGSEVTTKMLCAADPQWKTDSCDGDSGGPLVCSLQGRMTLTGIVSWGDGCALKDKPGVYTRVSHFLPWIRSHTKEENGLAL

SEQ ID NO: 439 - protein, 251 aa, Artificial Sequence
  UROKINASE-TYPE PLASMINOGEN ACTIVATOR (u-PA) protease domain R36H/V38D/Y40H/V41K/D97E/A98G/T97adel/H99L/L97bdel /C122S/Y151K/Q192V/R217D
IIGGEFTTIENQPWFAAIYRHHRGGSDTHKCGGSLISPCWVISATHCFIDYPKKEDYIVYLGRSRLNSNTQGEMKFEVENLILHKDYSAEGLHNDIALLKIRSKEGRCAQPSRTIQTISLPSMYNDPQFGTSCEITGFGKENSTDYLKPEQLKMTVVKLISHRECQQPHYYGSEVTTKMLCAADPQWKTDSCVGDSGGPLVCSLQGRMTLTGIVSWGDGCALKDKPGVYTRVSHFLPWIRSHTKEENGLAL

SEQ ID NO: 440 - protein, 251 aa, Artificial Sequence
  UROKINASE-TYPE PLASMINOGEN ACTIVATOR (u-PA) protease domain R36H/V38D/Y40L/V41K/D97E/A98G/T97adel/H99L/L97bdel /C122S/Y151R/Q192L/R217D
IIGGEFTTIENQPWFAAIYRHHRGGSDTLKCGGSLISPCWVISATHCFIDYPKKEDYIVYLGRSRLNSNTQGEMKFEVENLILHKDYSAEGLHNDIALLKIRSKEGRCAQPSRTIQTISLPSMYNDPQFGTSCEITGFGKENSTDYLRPEQLKMTVVKLISHRECQQPHYYGSEVTTKMLCAADPQWKTDSCLGDSGGPLVCSLQGRMTLTGIVSWGDGCALKDKPGVYTRVSHFLPWIRSHTKEENGLAL

SEQ ID NO: 441 - protein, 251 aa, Artificial Sequence
  UROKINASE-TYPE PLASMINOGEN ACTIVATOR (u-PA) protease domain R36H/V38D/Y40V/V41K/D97E/A98G/T97adel/H99L/L97bdel /C122S/Y151F/Q192F/R217D
IIGGEFTTIENQPWFAAIYRHHRGGSDTVKCGGSLISPCWVISATHCFIDYPKKEDYIVYLGRSRLNSNTQGEMKFEVENLILHKDYSAEGLHNDIALLKIRSKEGRCAQPSRTIQTISLPSMYNDPQFGTSCEITGFGKENSTDYLFPEQLKMTVVKLISHRECQQPHYYGSEVTTKMLCAADPQWKTDSCFGDSGGPLVCSLQGRMTLTGIVSWGDGCALKDKPGVYTRVSHFLPWIRSHTKEENGLAL

SEQ ID NO: 442 - protein, 251 aa, Artificial Sequence
  UROKINASE-TYPE PLASMINOGEN ACTIVATOR (u-PA) protease domain R36H/V38D/D97E/A98G/T97adel/H99L/L97bdel/C122S/Y15 1K/Q192E/R217D
IIGGEFTTIENQPWFAAIYRHHRGGSDTYVCGGSLISPCWVISATHCFIDYPKKEDYIVYLGRSRLNSNTQGEMKFEVENLILHKDYSAEGLHNDIALLKIRSKEGRCAQPSRTIQTISLPSMYNDPQFGTSCEITGFGKENSTDYLKPEQLKMTVVKLISHRECQQPHYYGSEVTTKMLCAADPQWKTDSCEGDSGGPLVCSLQGRMTLTGIVSWGDGCALKDKPGVYTRVSHFLPWIRSHTKEENGLAL

SEQ ID NO: 443 - protein, 251 aa, Artificial Sequence
  UROKINASE-TYPE PLASMINOGEN ACTIVATOR (u-PA) protease domain R36H/V38D/Y40L/V41K/D97E/A98G/T97adel/H99L/L97bdel /C122S/Y151K/Q192E/R217D
IIGGEFTTIENQPWFAAIYRHHRGGSDTLKCGGSLISPCWVISATHCFIDYPKKEDYIVYLGRSRLNSNTQGEMKFEVENLILHKDYSAEGLHNDIALLKIRSKEGRCAQPSRTIQTISLPSMYNDPQFGTSCEITGFGKENSTDYLKPEQLKMTVVKLISHRECQQPHYYGSEVTTKMLCAADPQWKTDSCEGDSGGPLVCSLQGRMTLTGIVSWGDGCALKDKPGVYTRVSHFLPWIRSHTKEENGLAL

SEQ ID NO: 444 - protein, 251 aa, Artificial Sequence
  UROKINASE-TYPE PLASMINOGEN ACTIVATOR (u-PA) protease domain R36H/V38D/Y40F/V41R/D97E/A98G/T97adel/H99L/L97bdel /C122S/Y151M/Q192D/R217D
IIGGEFTTIENQPWFAAIYRHHRGGSDTFRCGGSLISPCWVISATHCFIDYPKKEDYIVYLGRSRLNSNTQGEMKFEVENLILHKDYSAEGLHNDIALLKIRSKEGRCAQPSRTIQTISLPSMYNDPQFGTSCEITGFGKENSTDYLMPEQLKMTVVKLISHRECQQPHYYGSEVTTKMLCAADPQWKTDSCDGDSGGPLVCSLQGRMTLTGIVSWGDGCALKDKPGVYTRVSHFLPWIRSHTKEENGLAL

SEQ ID NO: 445 - protein, 251 aa, Artificial Sequence
  UROKINASE-TYPE PLASMINOGEN ACTIVATOR (u-PA) protease domain R36H/V38D/Y40L/V41K/D97E/A98G/T97adel/H99L/L97bdel /C122S/Y151L/Q192T/R217D
IIGGEFTTIENQPWFAAIYRHHRGGSDTLKCGGSLISPCWVISATHCFIDYPKKEDYIVYLGRSRLNSNTQGEMKFEVENLILHKDYSAEGLHNDIALLKIRSKEGRCAQPSRTIQTISLPSMYNDPQFGTSCEITGFGKENSTDYLLPEQLKMTVVKLISHRECQQPHYYGSEVTTKMLCAADPQWKTDSCTGDSGGPLVCSLQGRMTLTGIVSWGDGCALKDKPGVYTRVSHFLPWIRSHTKEENGLAL

SEQ ID NO: 446 - protein, 251 aa, Artificial Sequence
  UROKINASE-TYPE PLASMINOGEN ACTIVATOR (u-PA) protease domain R36H/V38D/Y40F/V41R/D97E/A98G/T97adel/H99L/L97bdel /C122S/Y151L/Q192E/R217D
IIGGEFTTIENQPWFAAIYRHHRGGSDTFRCGGSLISPCWVISATHCFIDYPKKEDYIVYLGRSRLNSNTQGEMKFEVENLILHKDYSAEGLHNDIALLKIRSKEGRCAQPSRTIQTISLPSMYNDPQFGTSCEITGFGKENSTDYLLPEQLKMTVVKLISHRECQQPHYYGSEVTTKMLCAADPQWKTDSCEGDSGGPLVCSLQGRMTLTGIVSWGDGCALKDKPGVYTRVSHFLPWIRSHTKEENGLAL

SEQ ID NO: 447 - protein, 251 aa, Artificial Sequence
  UROKINASE-TYPE PLASMINOGEN ACTIVATOR (u-PA) protease domain R36H/V38D/V41R/D97E/A98G/T97adel/H99L/L97bdel/C122 S/Y151L/Q192G/R217D
IIGGEFTTIENQPWFAAIYRHHRGGSDTYRCGGSLISPCWVISATHCFIDYPKKEDYIVYLGRSRLNSNTQGEMKFEVENLILHKDYSAEGLHNDIALLKIRSKEGRCAQPSRTIQTISLPSMYNDPQFGTSCEITGFGKENSTDYLLPEQLKMTVVKLISHRECQQPHYYGSEVTTKMLCAADPQWKTDSCGGDSGGPLVCSLQGRMTLTGIVSWGDGCALKDKPGVYTRVSHFLPWIRSHTKEENGLAL

SEQ ID NO: 448 - protein, 251 aa, Artificial Sequence
  UROKINASE-TYPE PLASMINOGEN ACTIVATOR (u-PA) protease domain R36H/V38D/Y40I/V41K/D97E/A98G/T97adel/H99L/L97bdel /C122S/Q192A/R217D
IIGGEFTTIENQPWFAAIYRHHRGGSDTIKCGGSLISPCWVISATHCFIDYPKKEDYIVYLGRSRLNSNTQGEMKFEVENLILHKDYSAEGLHNDIALLKIRSKEGRCAQPSRTIQTISLPSMYNDPQFGTSCEITGFGKENSTDYLYPEQLKMTVVKLISHRECQQPHYYGSEVTTKMLCAADPQWKTDSCAGDSGGPLVCSLQGRMTLTGIVSWGDGCALKDKPGVYTRVSHFLPWIRSHTKEENGLAL

SEQ ID NO: 449 - protein, 251 aa, Artificial Sequence
  UROKINASE-TYPE PLASMINOGEN ACTIVATOR (u-PA) protease domain R36H/V38D/V41K/D97E/A98G/T97adel/H99L/L97bdel/C122 S/Y151K/Q192E/R217D
IIGGEFTTIENQPWFAAIYRHHRGGSDTYKCGGSLISPCWVISATHCFIDYPKKEDYIVYLGRSRLNSNTQGEMKFEVENLILHKDYSAEGLHNDIALLKIRSKEGRCAQPSRTIQTISLPSMYNDPQFGTSCEITGFGKENSTDYLKPEQLKMTVVKLISHRECQQPHYYGSEVTTKMLCAADPQWKTDSCEGDSGGPLVCSLQGRMTLTGIVSWGDGCALKDKPGVYTRVSHFLPWIRSHTKEENGLAL

SEQ ID NO: 450 - protein, 251 aa, Artificial Sequence
  UROKINASE-TYPE PLASMINOGEN ACTIVATOR (u-PA) protease domain R36H/V38D/Y40L/V41R/D97E/A98G/T97adel/H99L/L97bdel /C122S/Y151L/Q192D/R217D
IIGGEFTTIENQPWFAAIYRHHRGGSDTLRCGGSLISPCWVISATHCFIDYPKKEDYIVYLGRSRLNSNTQGEMKFEVENLILHKDYSAEGLHNDIALLKIRSKEGRCAQPSRTIQTISLPSMYNDPQFGTSCEITGFGKENSTDYLLPEQLKMTVVKLISHRECQQPHYYGSEVTTKMLCAADPQWKTDSCDGDSGGPLVCSLQGRMTLTGIVSWGDGCALKDKPGVYTRVSHFLPWIRSHTKEENGLAL

SEQ ID NO: 451 - protein, 251 aa, Artificial Sequence
  UROKINASE-TYPE PLASMINOGEN ACTIVATOR (u-PA) protease domain R36H/V38D/Y40L/V41R/D97E/A98G/T97adel/H99L/L97bdel /C122S/Y151M/Q192T/R217D
IIGGEFTTIENQPWFAAIYRHHRGGSDTLRCGGSLISPCWVISATHCFIDYPKKEDYIVYLGRSRLNSNTQGEMKFEVENLILHKDYSAEGLHNDIALLKIRSKEGRCAQPSRTIQTISLPSMYNDPQFGTSCEITGFGKENSTDYLMPEQLKMTVVKLISHRECQQPHYYGSEVTTKMLCAADPQWKTDSCTGDSGGPLVCSLQGRMTLTGIVSWGDGCALKDKPGVYTRVSHFLPWIRSHTKEENGLAL

SEQ ID NO: 452 - protein, 251 aa, Artificial Sequence
  UROKINASE-TYPE PLASMINOGEN ACTIVATOR (u-PA) protease domain R36H/V38D/Y40L/V41R/D97E/A98G/T97adel/H99L/L97bdel /C122S/Y151L/Q192R/R217D
IIGGEFTTIENQPWFAAIYRHHRGGSDTLRCGGSLISPCWVISATHCFIDYPKKEDYIVYLGRSRLNSNTQGEMKFEVENLILHKDYSAEGLHNDIALLKIRSKEGRCAQPSRTIQTISLPSMYNDPQFGTSCEITGFGKENSTDYLLPEQLKMTVVKLISHRECQQPHYYGSEVTTKMLCAADPQWKTDSCRGDSGGPLVCSLQGRMTLTGIVSWGDGCALKDKPGVYTRVSHFLPWIRSHTKEENGLAL

SEQ ID NO: 453 - protein, 251 aa, Artificial Sequence
  UROKINASE-TYPE PLASMINOGEN ACTIVATOR (u-PA) protease domain R36H/V38D/Y40F/V41K/D97E/A98G/T97adel/H99L/L97bdel /C122S/Y151R/Q192E/R217D
IIGGEFTTIENQPWFAAIYRHHRGGSDTFKCGGSLISPCWVISATHCFIDYPKKEDYIVYLGRSRLNSNTQGEMKFEVENLILHKDYSAEGLHNDIALLKIRSKEGRCAQPSRTIQTISLPSMYNDPQFGTSCEITGFGKENSTDYLRPEQLKMTVVKLISHRECQQPHYYGSEVTTKMLCAADPQWKTDSCEGDSGGPLVCSLQGRMTLTGIVSWGDGCALKDKPGVYTRVSHFLPWIRSHTKEENGLAL

SEQ ID NO: 454 - protein, 251 aa, Artificial Sequence
  UROKINASE-TYPE PLASMINOGEN ACTIVATOR (u-PA) protease domain R36H/V38D/Y40L/V41R/D97E/A98G/T97adel/H99L/L97bdel /C122S/Y151N/Q192V/R217D
IIGGEFTTIENQPWFAAIYRHHRGGSDTLRCGGSLISPCWVISATHCFIDYPKKEDYIVYLGRSRLNSNTQGEMKFEVENLILHKDYSAEGLHNDIALLKIRSKEGRCAQPSRTIQTISLPSMYNDPQFGTSCEITGFGKENSTDYLNPEQLKMTVVKLISHRECQQPHYYGSEVTTKMLCAADPQWKTDSCVGDSGGPLVCSLQGRMTLTGIVSWGDGCALKDKPGVYTRVSHFLPWIRSHTKEENGLAL

SEQ ID NO: 455 - protein, 251 aa, Artificial Sequence
  UROKINASE-TYPE PLASMINOGEN ACTIVATOR (u-PA) protease domain R36H/V38D/Y40L/V41R/D97E/A98G/T97adel/H99L/L97bdel /C122S/Y151N/Q192D/R217D
IIGGEFTTIENQPWFAAIYRHHRGGSDTLRCGGSLISPCWVISATHCFIDYPKKEDYIVYLGRSRLNSNTQGEMKFEVENLILHKDYSAEGLHNDIALLKIRSKEGRCAQPSRTIQTISLPSMYNDPQFGTSCEITGFGKENSTDYLNPEQLKMTVVKLISHRECQQPHYYGSEVTTKMLCAADPQWKTDSCDGDSGGPLVCSLQGRMTLTGIVSWGDGCALKDKPGVYTRVSHFLPWIRSHTKEENGLAL

SEQ ID NO: 456 - protein, 251 aa, Artificial Sequence
  UROKINASE-TYPE PLASMINOGEN ACTIVATOR (u-PA) protease domain R36H/V38D/V41R/D97E/A98G/T97adel/H99L/L97bdel/C122 S/Y151K/Q192E/R217D
IIGGEFTTIENQPWFAAIYRHHRGGSDTYRCGGSLISPCWVISATHCFIDYPKKEDYIVYLGRSRLNSNTQGEMKFEVENLILHKDYSAEGLHNDIALLKIRSKEGRCAQPSRTIQTISLPSMYNDPQFGTSCEITGFGKENSTDYLKPEQLKMTVVKLISHRECQQPHYYGSEVTTKMLCAADPQWKTDSCEGDSGGPLVCSLQGRMTLTGIVSWGDGCALKDKPGVYTRVSHFLPWIRSHTKEENGLAL

SEQ ID NO: 457 - protein, 251 aa, Artificial Sequence
  UROKINASE-TYPE PLASMINOGEN ACTIVATOR (u-PA) protease domain R36H/V38D/Y40F/V41R/D97E/A98G/T97adel/H99L/L97bdel /C122S/Y151K/Q192E/R217D
IIGGEFTTIENQPWFAAIYRHHRGGSDTFRCGGSLISPCWVISATHCFIDYPKKEDYIVYLGRSRLNSNTQGEMKFEVENLILHKDYSAEGLHNDIALLKIRSKEGRCAQPSRTIQTISLPSMYNDPQFGTSCEITGFGKENSTDYLKPEQLKMTVVKLISHRECQQPHYYGSEVTTKMLCAADPQWKTDSCEGDSGGPLVCSLQGRMTLTGIVSWGDGCALKDKPGVYTRVSHFLPWIRSHTKEENGLAL

SEQ ID NO: 458 - protein, 251 aa, Artificial Sequence
  UROKINASE-TYPE PLASMINOGEN ACTIVATOR (u-PA) protease domain R36H/V38D/Y40I/V41A/D97E/A98G/T97adel/H99L/L97bdel /C122S/Y151M/Q192L/R217D
IIGGEFTTIENQPWFAAIYRHHRGGSDTIACGGSLISPCWVISATHCFIDYPKKEDYIVYLGRSRLNSNTQGEMKFEVENLILHKDYSAEGLHNDIALLKIRSKEGRCAQPSRTIQTISLPSMYNDPQFGTSCEITGFGKENSTDYLMPEQLKMTVVKLISHRECQQPHYYGSEVTTKMLCAADPQWKTDSCLGDSGGPLVCSLQGRMTLTGIVSWGDGCALKDKPGVYTRVSHFLPWIRSHTKEENGLAL

SEQ ID NO: 459 - protein, 251 aa, Artificial Sequence
  UROKINASE-TYPE PLASMINOGEN ACTIVATOR (u-PA) protease domain R36H/V38D/Y40H/V41M/D97E/A98G/T97adel/H99L/L97bdel /C122S/R217D
IIGGEFTTIENQPWFAAIYRHHRGGSDTHMCGGSLISPCWVISATHCFIDYPKKEDYIVYLGRSRLNSNTQGEMKFEVENLILHKDYSAEGLHNDIALLKIRSKEGRCAQPSRTIQTISLPSMYNDPQFGTSCEITGFGKENSTDYLYPEQLKMTVVKLISHRECQQPHYYGSEVTTKMLCAADPQWKTDSCQGDSGGPLVCSLQGRMTLTGIVSWGDGCALKDKPGVYTRVSHFLPWIRSHTKEENGLAL

SEQ ID NO: 460 - protein, 251 aa, Artificial Sequence
  UROKINASE-TYPE PLASMINOGEN ACTIVATOR (u-PA) protease domain F30Y/R36H/V38D/V41K/D97E/T97adel/A98G/L97bdel/H99L /C122S/R217D
IIGGEFTTIENQPWYAAIYRHHRGGSDTYKCGGSLISPCWVISATHCFIDYPKKEDYIVYLGRSRLNSNTQGEMKFEVENLILHKDYSAEGLHNDIALLKIRSKEGRCAQPSRTIQTISLPSMYNDPQFGTSCEITGFGKENSTDYLYPEQLKMTVVKLISHRECQQPHYYGSEVTTKMLCAADPQWKTDSCQGDSGGPLVCSLQGRMTLTGIVSWGDGCALKDKPGVYTRVSHFLPWIRSHTKEENGLAL

SEQ ID NO: 461 - protein, 251 aa, Artificial Sequence
  UROKINASE-TYPE PLASMINOGEN ACTIVATOR (u-PA) protease domain R36H/V38D/V41K/D97E/A98G/T97adel/H99L/L97bdel/C122 S/V213A/R217D
IIGGEFTTIENQPWFAAIYRHHRGGSDTYKCGGSLISPCWVISATHCFIDYPKKEDYIVYLGRSRLNSNTQGEMKFEVENLILHKDYSAEGLHNDIALLKIRSKEGRCAQPSRTIQTISLPSMYNDPQFGTSCEITGFGKENSTDYLYPEQLKMTVVKLISHRECQQPHYYGSEVTTKMLCAADPQWKTDSCQGDSGGPLVCSLQGRMTLTGIASWGDGCALKDKPGVYTRVSHFLPWIRSHTKEENGLAL

SEQ ID NO: 462 - protein, 251 aa, Artificial Sequence
  UROKINASE-TYPE PLASMINOGEN ACTIVATOR (u-PA) protease domain R36H/V38D/V41M/F59I/D97E/T97adel/A98G/L97bdel/H99L /C122S/R217D
IIGGEFTTIENQPWFAAIYRHHRGGSDTYMCGGSLISPCWVISATHCIIDYPKKEDYIVYLGRSRLNSNTQGEMKFEVENLILHKDYSAEGLHNDIALLKIRSKEGRCAQPSRTIQTISLPSMYNDPQFGTSCEITGFGKENSTDYLYPEQLKMTVVKLISHRECQQPHYYGSEVTTKMLCAADPQWKTDSCQGDSGGPLVCSLQGRMTLTGIVSWGDGCALKDKPGVYTRVSHFLPWIRSHTKEENGLAL

SEQ ID NO: 463 - protein, 251 aa, Artificial Sequence
  UROKINASE-TYPE PLASMINOGEN ACTIVATOR (u-PA) protease domain R36H/V38D/V41M/A55S/D97E/A98G/T97adel/H99L/L97bdel /C122S/R217D
IIGGEFTTIENQPWFAAIYRHHRGGSDTYMCGGSLISPCWVISSTHCFIDYPKKEDYIVYLGRSRLNSNTQGEMKFEVENLILHKDYSAEGLHNDIALLKIRSKEGRCAQPSRTIQTISLPSMYNDPQFGTSCEITGFGKENSTDYLYPEQLKMTVVKLISHRECQQPHYYGSEVTTKMLCAADPQWKTDSCQGDSGGPLVCSLQGRMTLTGIVSWGDGCALKDKPGVYTRVSHFLPWIRSHTKEENGLAL

SEQ ID NO: 464 - protein, 252 aa, Artificial Sequence
  UROKINASE-TYPE PLASMINOGEN ACTIVATOR (u-PA) protease domain R36H/V38D/V41R/A96D/D97G/T97aN/A98G/L97bdel/H99L/C 122S/G193R/R217F
IIGGEFTTIENQPWFAAIYRHHRGGSDTYRCGGSLISPCWVISATHCFIDYPKKEDYIVYLGRSRLNSNTQGEMKFEVENLILHKDYSDGNGLHNDIALLKIRSKEGRCAQPSRTIQTISLPSMYNDPQFGTSCEITGFGKENSTDYLYPEQLKMTVVKLISHRECQQPHYYGSEVTTKMLCAADPQWKTDSCQRDSGGPLVCSLQGRMTLTGIVSWGFGCALKDKPGVYTRVSHFLPWIRSHTKEENGLAL

SEQ ID NO: 465 - protein, 252 aa, Artificial Sequence
  UROKINASE-TYPE PLASMINOGEN ACTIVATOR (u-PA) protease domain R36H/V38D/V41R/A96D/D97G/T97aN/A98G/L97bdel/H99L/C 122S/Q192R/R217F
IIGGEFTTIENQPWFAAIYRHHRGGSDTYRCGGSLISPCWVISATHCFIDYPKKEDYIVYLGRSRLNSNTQGEMKFEVENLILHKDYSDGNGLHNDIALLKIRSKEGRCAQPSRTIQTISLPSMYNDPQFGTSCEITGFGKENSTDYLYPEQLKMTVVKLISHRECQQPHYYGSEVTTKMLCAADPQWKTDSCRGDSGGPLVCSLQGRMTLTGIVSWGFGCALKDKPGVYTRVSHFLPWIRSHTKEENGLAL

SEQ ID NO: 466 - protein, 251 aa, Artificial Sequence
  UROKINASE-TYPE PLASMINOGEN ACTIVATOR (u-PA) protease domain R36H/G37cD/V38D/V41R/A96D/D97G/A98G/T97adel/H99L/L 97bdel/C122S/M157T/R217D
IIGGEFTTIENQPWFAAIYRHHRGDSDTYRCGGSLISPCWVISATHCFIDYPKKEDYIVYLGRSRLNSNTQGEMKFEVENLILHKDYSDGGLHNDIALLKIRSKEGRCAQPSRTIQTISLPSMYNDPQFGTSCEITGFGKENSTDYLYPEQLKTTVVKLISHRECQQPHYYGSEVTTKMLCAADPQWKTDSCQGDSGGPLVCSLQGRMTLTGIVSWGDGCALKDKPGVYTRVSHFLPWIRSHTKEENGLAL

SEQ ID NO: 467 - protein, 251 aa, Artificial Sequence
  UROKINASE-TYPE PLASMINOGEN ACTIVATOR (u-PA) protease domain V38D/V41R/A96D/D97G/A98G/T97adel/H99L/L97bdel/C122 S/Q192R/R217D
IIGGEFTTIENQPWFAAIYRRHRGGSDTYRCGGSLISPCWVISATHCFIDYPKKEDYIVYLGRSRLNSNTQGEMKFEVENLILHKDYSDGGLHNDIALLKIRSKEGRCAQPSRTIQTISLPSMYNDPQFGTSCEITGFGKENSTDYLYPEQLKMTVVKLISHRECQQPHYYGSEVTTKMLCAADPQWKTDSCRGDSGGPLVCSLQGRMTLTGIVSWGDGCALKDKPGVYTRVSHFLPWIRSHTKEENGLAL

SEQ ID NO: 468 - protein, 251 aa, Artificial Sequence
  UROKINASE-TYPE PLASMINOGEN ACTIVATOR (u-PA) protease domain F21S/R36H/V38D/V41R/A96D/D97G/A98G/T97adel/H99L/L9 7bdel/C122S/E175D/R217D
IIGGESTTIENQPWFAAIYRHHRGGSDTYRCGGSLISPCWVISATHCFIDYPKKEDYIVYLGRSRLNSNTQGEMKFEVENLILHKDYSDGGLHNDIALLKIRSKEGRCAQPSRTIQTISLPSMYNDPQFGTSCEITGFGKENSTDYLYPEQLKMTVVKLISHRECQQPHYYGSDVTTKMLCAADPQWKTDSCQGDSGGPLVCSLQGRMTLTGIVSWGDGCALKDKPGVYTRVSHFLPWIRSHTKEENGLAL

SEQ ID NO: 469 - protein, 251 aa, Artificial Sequence
  UROKINASE-TYPE PLASMINOGEN ACTIVATOR (u-PA) protease domain R36H/V38D/V41R/A96D/D97E/A98G/T97adel/H99L/L97bdel /C122S/T178S/R217D
IIGGEFTTIENQPWFAAIYRHHRGGSDTYRCGGSLISPCWVISATHCFIDYPKKEDYIVYLGRSRLNSNTQGEMKFEVENLILHKDYSDEGLHNDIALLKIRSKEGRCAQPSRTIQTISLPSMYNDPQFGTSCEITGFGKENSTDYLYPEQLKMTVVKLISHRECQQPHYYGSEVTSKMLCAADPQWKTDSCQGDSGGPLVCSLQGRMTLTGIVSWGDGCALKDKPGVYTRVSHFLPWIRSHTKEENGLAL

SEQ ID NO: 470 - protein, 251 aa, Artificial Sequence
  UROKINASE-TYPE PLASMINOGEN ACTIVATOR (u-PA) protease domain R36H/V38D/V41R/A96D/D97E/A98G/T97adel/H99L/L97bdel /C122S/G193R/R217D
IIGGEFTTIENQPWFAAIYRHHRGGSDTYRCGGSLISPCWVISATHCFIDYPKKEDYIVYLGRSRLNSNTQGEMKFEVENLILHKDYSDEGLHNDIALLKIRSKEGRCAQPSRTIQTISLPSMYNDPQFGTSCEITGFGKENSTDYLYPEQLKMTVVKLISHRECQQPHYYGSEVTTKMLCAADPQWKTDSCQRDSGGPLVCSLQGRMTLTGIVSWGDGCALKDKPGVYTRVSHFLPWIRSHTKEENGLAL

SEQ ID NO: 471 - protein, 253 aa, Artificial Sequence
  UROKINASE-TYPE PLASMINOGEN ACTIVATOR (u-PA) protease domain F30H/V38D/V41R/L97bA/H99Q/C122S/M157E
IIGGEFTTIENQPWHAAIYRRHRGGSDTYRCGGSLISPCWVISATHCFIDYPKKEDYIVYLGRSRLNSNTQGEMKFEVENLILHKDYSADTAAQHNDIALLKIRSKEGRCAQPSRTIQTISLPSMYNDPQFGTSCEITGFGKENSTDYLYPEQLKETVVKLISHRECQQPHYYGSEVTTKMLCAADPQWKTDSCQGDSGGPLVCSLQGRMTLTGIVSWGRGCALKDKPGVYTRVSHFLPWIRSHTKEENGLAL

SEQ ID NO: 472 - protein, 253 aa, Artificial Sequence
  UROKINASE-TYPE PLASMINOGEN ACTIVATOR (u-PA) protease domain F30H/V38D/V41R/L97bA/H99Q/C122S/Y151F/M157K/Q192W
IIGGEFTTIENQPWHAAIYRRHRGGSDTYRCGGSLISPCWVISATHCFIDYPKKEDYIVYLGRSRLNSNTQGEMKFEVENLILHKDYSADTAAQHNDIALLKIRSKEGRCAQPSRTIQTISLPSMYNDPQFGTSCEITGFGKENSTDYLFPEQLKKTVVKLISHRECQQPHYYGSEVTTKMLCAADPQWKTDSCWGDSGGPLVCSLQGRMTLTGIVSWGRGCALKDKPGVYTRVSHFLPWIRSHTKEENGLAL

SEQ ID NO: 473 - protein, 253 aa, Artificial Sequence
  UROKINASE-TYPE PLASMINOGEN ACTIVATOR (u-PA) protease domain F30Y/V38D/Y40H/V41A/L97bA/H99Q/C122S/M157R
IIGGEFTTIENQPWYAAIYRRHRGGSDTHACGGSLISPCWVISATHCFIDYPKKEDYIVYLGRSRLNSNTQGEMKFEVENLILHKDYSADTAAQHNDIALLKIRSKEGRCAQPSRTIQTISLPSMYNDPQFGTSCEITGFGKENSTDYLYPEQLKRTVVKLISHRECQQPHYYGSEVTTKMLCAADPQWKTDSCQGDSGGPLVCSLQGRMTLTGIVSWGRGCALKDKPGVYTRVSHFLPWIRSHTKEENGLAL

SEQ ID NO: 474 - protein, 253 aa, Artificial Sequence
  UROKINASE-TYPE PLASMINOGEN ACTIVATOR (u-PA) protease domain F30H/V38D/Y40F/V41R/L97bA/H99Q/C122S/Y151R/M157K
IIGGEFTTIENQPWHAAIYRRHRGGSDTFRCGGSLISPCWVISATHCFIDYPKKEDYIVYLGRSRLNSNTQGEMKFEVENLILHKDYSADTAAQHNDIALLKIRSKEGRCAQPSRTIQTISLPSMYNDPQFGTSCEITGFGKENSTDYLRPEQLKKTVVKLISHRECQQPHYYGSEVTTKMLCAADPQWKTDSCQGDSGGPLVCSLQGRMTLTGIVSWGRGCALKDKPGVYTRVSHFLPWIRSHTKEENGLAL

SEQ ID NO: 475 - protein, 253 aa, Artificial Sequence
  UROKINASE-TYPE PLASMINOGEN ACTIVATOR (u-PA) protease domain F30H/V38D/Y40F/V41R/L97bA/H99Q/C122S/Y151L/M157F
IIGGEFTTIENQPWHAAIYRRHRGGSDTFRCGGSLISPCWVISATHCFIDYPKKEDYIVYLGRSRLNSNTQGEMKFEVENLILHKDYSADTAAQHNDIALLKIRSKEGRCAQPSRTIQTISLPSMYNDPQFGTSCEITGFGKENSTDYLLPEQLKFTVVKLISHRECQQPHYYGSEVTTKMLCAADPQWKTDSCQGDSGGPLVCSLQGRMTLTGIVSWGRGCALKDKPGVYTRVSHFLPWIRSHTKEENGLAL

SEQ ID NO: 476 - protein, 253 aa, Artificial Sequence
  UROKINASE-TYPE PLASMINOGEN ACTIVATOR (u-PA) protease domain F30Y/V38D/Y40H/V41N/L97bA/H99Q/C122S
IIGGEFTTIENQPWYAAIYRRHRGGSDTHNCGGSLISPCWVISATHCFIDYPKKEDYIVYLGRSRLNSNTQGEMKFEVENLILHKDYSADTAAQHNDIALLKIRSKEGRCAQPSRTIQTISLPSMYNDPQFGTSCEITGFGKENSTDYLYPEQLKMTVVKLISHRECQQPHYYGSEVTTKMLCAADPQWKTDSCQGDSGGPLVCSLQGRMTLTGIVSWGRGCALKDKPGVYTRVSHFLPWIRSHTKEENGLAL

SEQ ID NO: 477 - protein, 253 aa, Artificial Sequence
  UROKINASE-TYPE PLASMINOGEN ACTIVATOR (u-PA) protease domain F30S/V38D/V41R/L97bA/H99Q/C122S/Y151L/M157K
IIGGEFTTIENQPWSAAIYRRHRGGSDTYRCGGSLISPCWVISATHCFIDYPKKEDYIVYLGRSRLNSNTQGEMKFEVENLILHKDYSADTAAQHNDIALLKIRSKEGRCAQPSRTIQTISLPSMYNDPQFGTSCEITGFGKENSTDYLLPEQLKKTVVKLISHRECQQPHYYGSEVTTKMLCAADPQWKTDSCQGDSGGPLVCSLQGRMTLTGIVSWGRGCALKDKPGVYTRVSHFLPWIRSHTKEENGLAL

SEQ ID NO: 478 - protein, 253 aa, Artificial Sequence
  UROKINASE-TYPE PLASMINOGEN ACTIVATOR (u-PA) protease domain F30Y/V38D/Y40L/V41R/L97bA/H99Q/C122S/M157R
IIGGEFTTIENQPWYAAIYRRHRGGSDTLRCGGSLISPCWVISATHCFIDYPKKEDYIVYLGRSRLNSNTQGEMKFEVENLILHKDYSADTAAQHNDIALLKIRSKEGRCAQPSRTIQTISLPSMYNDPQFGTSCEITGFGKENSTDYLYPEQLKRTVVKLISHRECQQPHYYGSEVTTKMLCAADPQWKTDSCQGDSGGPLVCSLQGRMTLTGIVSWGRGCALKDKPGVYTRVSHFLPWIRSHTKEENGLAL

SEQ ID NO: 479 - protein, 253 aa, Artificial Sequence
  UROKINASE-TYPE PLASMINOGEN ACTIVATOR (u-PA) protease domain F30Y/R36H/V38D/Y40F/V41R/L97bA/H99Q/C122S/Y151M/M1 57Y/Q192A
IIGGEFTTIENQPWYAAIYRHHRGGSDTFRCGGSLISPCWVISATHCFIDYPKKEDYIVYLGRSRLNSNTQGEMKFEVENLILHKDYSADTAAQHNDIALLKIRSKEGRCAQPSRTIQTISLPSMYNDPQFGTSCEITGFGKENSTDYLMPEQLKYTVVKLISHRECQQPHYYGSEVTTKMLCAADPQWKTDSCAGDSGGPLVCSLQGRMTLTGIVSWGRGCALKDKPGVYTRVSHFLPWIRSHTKEENGLAL

SEQ ID NO: 480 - protein, 253 aa, Artificial Sequence
  UROKINASE-TYPE PLASMINOGEN ACTIVATOR (u-PA) protease domain F30Y/V38D/Y40L/V41R/L97bA/H99Q/C122S/Y151L/M157T/Q 192L
IIGGEFTTIENQPWYAAIYRRHRGGSDTLRCGGSLISPCWVISATHCFIDYPKKEDYIVYLGRSRLNSNTQGEMKFEVENLILHKDYSADTAAQHNDIALLKIRSKEGRCAQPSRTIQTISLPSMYNDPQFGTSCEITGFGKENSTDYLLPEQLKTTVVKLISHRECQQPHYYGSEVTTKMLCAADPQWKTDSCLGDSGGPLVCSLQGRMTLTGIVSWGRGCALKDKPGVYTRVSHFLPWIRSHTKEENGLAL

SEQ ID NO: 481 - protein, 253 aa, Artificial Sequence
  UROKINASE-TYPE PLASMINOGEN ACTIVATOR (u-PA) protease domain F30H/V38D/V41R/L97bA/H99Q/C122S/Y151L/M157S
IIGGEFTTIENQPWHAAIYRRHRGGSDTYRCGGSLISPCWVISATHCFIDYPKKEDYIVYLGRSRLNSNTQGEMKFEVENLILHKDYSADTAAQHNDIALLKIRSKEGRCAQPSRTIQTISLPSMYNDPQFGTSCEITGFGKENSTDYLLPEQLKSTVVKLISHRECQQPHYYGSEVTTKMLCAADPQWKTDSCQGDSGGPLVCSLQGRMTLTGIVSWGRGCALKDKPGVYTRVSHFLPWIRSHTKEENGLAL

SEQ ID NO: 482 - protein, 253 aa, Artificial Sequence
  UROKINASE-TYPE PLASMINOGEN ACTIVATOR (u-PA) protease domain F30Y/V38D/Y40H/V41K/L97bA/H99Q/C122S/Y151R/M157R
IIGGEFTTIENQPWYAAIYRRHRGGSDTHKCGGSLISPCWVISATHCFIDYPKKEDYIVYLGRSRLNSNTQGEMKFEVENLILHKDYSADTAAQHNDIALLKIRSKEGRCAQPSRTIQTISLPSMYNDPQFGTSCEITGFGKENSTDYLRPEQLKRTVVKLISHRECQQPHYYGSEVTTKMLCAADPQWKTDSCQGDSGGPLVCSLQGRMTLTGIVSWGRGCALKDKPGVYTRVSHFLPWIRSHTKEENGLAL

SEQ ID NO: 483 - protein, 253 aa, Artificial Sequence
  UROKINASE-TYPE PLASMINOGEN ACTIVATOR (u-PA) protease domain F30Y/V38D/Y40M/V41R/L97bA/H99Q/C122S
IIGGEFTTIENQPWYAAIYRRHRGGSDTMRCGGSLISPCWVISATHCFIDYPKKEDYIVYLGRSRLNSNTQGEMKFEVENLILHKDYSADTAAQHNDIALLKIRSKEGRCAQPSRTIQTISLPSMYNDPQFGTSCEITGFGKENSTDYLYPEQLKMTVVKLISHRECQQPHYYGSEVTTKMLCAADPQWKTDSCQGDSGGPLVCSLQGRMTLTGIVSWGRGCALKDKPGVYTRVSHFLPWIRSHTKEENGLAL

SEQ ID NO: 484 - protein, 253 aa, Artificial Sequence
  UROKINASE-TYPE PLASMINOGEN ACTIVATOR (u-PA) protease domain F30H/V38D/V41R/L97bA/H99Q/C122S/Y151L/M157K
IIGGEFTTIENQPWHAAIYRRHRGGSDTYRCGGSLISPCWVISATHCFIDYPKKEDYIVYLGRSRLNSNTQGEMKFEVENLILHKDYSADTAAQHNDIALLKIRSKEGRCAQPSRTIQTISLPSMYNDPQFGTSCEITGFGKENSTDYLLPEQLKKTVVKLISHRECQQPHYYGSEVTTKMLCAADPQWKTDSCQGDSGGPLVCSLQGRMTLTGIVSWGRGCALKDKPGVYTRVSHFLPWIRSHTKEENGLAL

SEQ ID NO: 485 - protein, 253 aa, Artificial Sequence
  UROKINASE-TYPE PLASMINOGEN ACTIVATOR (u-PA) protease domain F30Y/V38D/Y40H/V41R/L97bA/H99Q/C122S
IIGGEFTTIENQPWYAAIYRRHRGGSDTHRCGGSLISPCWVISATHCFIDYPKKEDYIVYLGRSRLNSNTQGEMKFEVENLILHKDYSADTAAQHNDIALLKIRSKEGRCAQPSRTIQTISLPSMYNDPQFGTSCEITGFGKENSTDYLYPEQLKMTVVKLISHRECQQPHYYGSEVTTKMLCAADPQWKTDSCQGDSGGPLVCSLQGRMTLTGIVSWGRGCALKDKPGVYTRVSHFLPWIRSHTKEENGLAL

SEQ ID NO: 486 - protein, 253 aa, Artificial Sequence
  UROKINASE-TYPE PLASMINOGEN ACTIVATOR (u-PA) protease domain F30H/V38D/V41R/A96G/L97bA/H99Q/C122S/Y151L/M157K
IIGGEFTTIENQPWHAAIYRRHRGGSDTYRCGGSLISPCWVISATHCFIDYPKKEDYIVYLGRSRLNSNTQGEMKFEVENLILHKDYSGDTAAQHNDIALLKIRSKEGRCAQPSRTIQTISLPSMYNDPQFGTSCEITGFGKENSTDYLLPEQLKKTVVKLISHRECQQPHYYGSEVTTKMLCAADPQWKTDSCQGDSGGPLVCSLQGRMTLTGIVSWGRGCALKDKPGVYTRVSHFLPWIRSHTKEENGLAL

SEQ ID NO: 487 - protein, 253 aa, Artificial Sequence
  UROKINASE-TYPE PLASMINOGEN ACTIVATOR (u-PA) protease domain F30H/G37bD/V38D/T39H/V41R/L97bA/H99Q/R110dH/C122S/ Y151L/M157K/S240I
IIGGEFTTIENQPWHAAIYRRHRDGSDHYRCGGSLISPCWVISATHCFIDYPKKEDYIVYLGRSRLNSNTQGEMKFEVENLILHKDYSADTAAQHNDIALLKIRSKEGHCAQPSRTIQTISLPSMYNDPQFGTSCEITGFGKENSTDYLLPEQLKKTVVKLISHRECQQPHYYGSEVTTKMLCAADPQWKTDSCQGDSGGPLVCSLQGRMTLTGIVSWGRGCALKDKPGVYTRVSHFLPWIRIHTKEENGLAL

SEQ ID NO: 488 - protein, 253 aa, Artificial Sequence
  UROKINASE-TYPE PLASMINOGEN ACTIVATOR (u-PA) protease domain F30H/V38D/V41R/L97bA/H99Q/C122S/Y149N/Y151L/M157K/ R239H
IIGGEFTTIENQPWHAAIYRRHRGGSDTYRCGGSLISPCWVISATHCFIDYPKKEDYIVYLGRSRLNSNTQGEMKFEVENLILHKDYSADTAAQHNDIALLKIRSKEGRCAQPSRTIQTISLPSMYNDPQFGTSCEITGFGKENSTDNLLPEQLKKTVVKLISHRECQQPHYYGSEVTTKMLCAADPQWKTDSCQGDSGGPLVCSLQGRMTLTGIVSWGRGCALKDKPGVYTRVSHFLPWIHSHTKEENGLAL

SEQ ID NO: 489 - protein, 253 aa, Artificial Sequence
  UROKINASE-TYPE PLASMINOGEN ACTIVATOR (u-PA) protease domain F30Y/A32E/V38D/Y40H/V41R/L97bA/H99Q/C122S/M157K
IIGGEFTTIENQPWYAEIYRRHRGGSDTHRCGGSLISPCWVISATHCFIDYPKKEDYIVYLGRSRLNSNTQGEMKFEVENLILHKDYSADTAAQHNDIALLKIRSKEGRCAQPSRTIQTISLPSMYNDPQFGTSCEITGFGKENSTDYLYPEQLKKTVVKLISHRECQQPHYYGSEVTTKMLCAADPQWKTDSCQGDSGGPLVCSLQGRMTLTGIVSWGRGCALKDKPGVYTRVSHFLPWIRSHTKEENGLAL

SEQ ID NO: 490 - protein, 253 aa, Artificial Sequence
  UROKINASE-TYPE PLASMINOGEN ACTIVATOR (u-PA) protease domain F30Y/R37aH/V38D/Y40L/V41R/L97bA/H99Q/R110dH/C122S/ M157K/V160I
IIGGEFTTIENQPWYAAIYRRHHGGSDTLRCGGSLISPCWVISATHCFIDYPKKEDYIVYLGRSRLNSNTQGEMKFEVENLILHKDYSADTAAQHNDIALLKIRSKEGHCAQPSRTIQTISLPSMYNDPQFGTSCEITGFGKENSTDYLYPEQLKKTVIKLISHRECQQPHYYGSEVTTKMLCAADPQWKTDSCQGDSGGPLVCSLQGRMTLTGIVSWGRGCALKDKPGVYTRVSHFLPWIRSHTKEENGLAL

SEQ ID NO: 491 - protein, 253 aa, Artificial Sequence
  UROKINASE-TYPE PLASMINOGEN ACTIVATOR (u-PA) protease domain F30Y/A32E/Y34N/V38D/Y40H/V41R/L97bA/H99Q/C122S/M15 7K
IIGGEFTTIENQPWYAEINRRHRGGSDTHRCGGSLISPCWVISATHCFIDYPKKEDYIVYLGRSRLNSNTQGEMKFEVENLILHKDYSADTAAQHNDIALLKIRSKEGRCAQPSRTIQTISLPSMYNDPQFGTSCEITGFGKENSTDYLYPEQLKKTVVKLISHRECQQPHYYGSEVTTKMLCAADPQWKTDSCQGDSGGPLVCSLQGRMTLTGIVSWGRGCALKDKPGVYTRVSHFLPWIRSHTKEENGLAL

SEQ ID NO: 492 - protein, 253 aa, Artificial Sequence
  UROKINASE-TYPE PLASMINOGEN ACTIVATOR (u-PA) protease domain F30Y/R37aH/V38D/Y40L/V41R/L97bA/H99Q/C122S/M157K
IIGGEFTTIENQPWYAAIYRRHHGGSDTLRCGGSLISPCWVISATHCFIDYPKKEDYIVYLGRSRLNSNTQGEMKFEVENLILHKDYSADTAAQHNDIALLKIRSKEGRCAQPSRTIQTISLPSMYNDPQFGTSCEITGFGKENSTDYLYPEQLKKTVVKLISHRECQQPHYYGSEVTTKMLCAADPQWKTDSCQGDSGGPLVCSLQGRMTLTGIVSWGRGCALKDKPGVYTRVSHFLPWIRSHTKEENGLAL

SEQ ID NO: 493 - protein, 253 aa, Artificial Sequence
  UROKINASE-TYPE PLASMINOGEN ACTIVATOR (u-PA) protease domain F30Y/V38D/V41R/L97bA/H99Q/C122S/M157K
IIGGEFTTIENQPWYAAIYRRHRGGSDTYRCGGSLISPCWVISATHCFIDYPKKEDYIVYLGRSRLNSNTQGEMKFEVENLILHKDYSADTAAQHNDIALLKIRSKEGRCAQPSRTIQTISLPSMYNDPQFGTSCEITGFGKENSTDYLYPEQLKKTVVKLISHRECQQPHYYGSEVTTKMLCAADPQWKTDSCQGDSGGPLVCSLQGRMTLTGIVSWGRGCALKDKPGVYTRVSHFLPWIRSHTKEENGLAL

SEQ ID NO: 494 - protein, 253 aa, Artificial Sequence
  UROKINASE-TYPE PLASMINOGEN ACTIVATOR (u-PA) protease domain F30Y/R35H/V38D/Y40H/V41R/T56A/L97bA/H99Q/C122S/M15 7K
IIGGEFTTIENQPWYAAIYHRHRGGSDTHRCGGSLISPCWVISAAHCFIDYPKKEDYIVYLGRSRLNSNTQGEMKFEVENLILHKDYSADTAAQHNDIALLKIRSKEGRCAQPSRTIQTISLPSMYNDPQFGTSCEITGFGKENSTDYLYPEQLKKTVVKLISHRECQQPHYYGSEVTTKMLCAADPQWKTDSCQGDSGGPLVCSLQGRMTLTGIVSWGRGCALKDKPGVYTRVSHFLPWIRSHTKEENGLAL

SEQ ID NO: 495 - protein, 253 aa, Artificial Sequence
  UROKINASE-TYPE PLASMINOGEN ACTIVATOR (u-PA) protease domain F30Y/V38D/Y40H/V41R/L97bA/H99Q/C122S/M157K/T158A
IIGGEFTTIENQPWYAAIYRRHRGGSDTHRCGGSLISPCWVISATHCFIDYPKKEDYIVYLGRSRLNSNTQGEMKFEVENLILHKDYSADTAAQHNDIALLKIRSKEGRCAQPSRTIQTISLPSMYNDPQFGTSCEITGFGKENSTDYLYPEQLKKAVVKLISHRECQQPHYYGSEVTTKMLCAADPQWKTDSCQGDSGGPLVCSLQGRMTLTGIVSWGRGCALKDKPGVYTRVSHFLPWIRSHTKEENGLAL

SEQ ID NO: 496 - protein, 253 aa, Artificial Sequence
  UROKINASE-TYPE PLASMINOGEN ACTIVATOR (u-PA) protease domain F30Y/V38E/Y40H/V41R/T56A/L97bA/H99Q/C122S/M157K/K2 43M
IIGGEFTTIENQPWYAAIYRRHRGGSETHRCGGSLISPCWVISAAHCFIDYPKKEDYIVYLGRSRLNSNTQGEMKFEVENLILHKDYSADTAAQHNDIALLKIRSKEGRCAQPSRTIQTISLPSMYNDPQFGTSCEITGFGKENSTDYLYPEQLKKTVVKLISHRECQQPHYYGSEVTTKMLCAADPQWKTDSCQGDSGGPLVCSLQGRMTLTGIVSWGRGCALKDKPGVYTRVSHFLPWIRSHTMEENGLAL

SEQ ID NO: 497 - protein, 253 aa, Artificial Sequence
  UROKINASE-TYPE PLASMINOGEN ACTIVATOR (u-PA) protease domain F30Y/Y34N/V38D/Y40H/V41R/Y94F/S95R/L97bA/H99Q/C122 S/M157K/T242I
IIGGEFTTIENQPWYAAINRRHRGGSDTHRCGGSLISPCWVISATHCFIDYPKKEDYIVYLGRSRLNSNTQGEMKFEVENLILHKDFRADTAAQHNDIALLKIRSKEGRCAQPSRTIQTISLPSMYNDPQFGTSCEITGFGKENSTDYLYPEQLKKTVVKLISHRECQQPHYYGSEVTTKMLCAADPQWKTDSCQGDSGGPLVCSLQGRMTLTGIVSWGRGCALKDKPGVYTRVSHFLPWIRSHIKEENGLAL

SEQ ID NO: 498 - protein, 253 aa, Artificial Sequence
  UROKINASE-TYPE PLASMINOGEN ACTIVATOR (u-PA) protease domain F30Y/R36H/V38E/Y40H/V41R/T97aI/L97bA/H99Q/C122S/M1 57K
IIGGEFTTIENQPWYAAIYRHHRGGSETHRCGGSLISPCWVISATHCFIDYPKKEDYIVYLGRSRLNSNTQGEMKFEVENLILHKDYSADIAAQHNDIALLKIRSKEGRCAQPSRTIQTISLPSMYNDPQFGTSCEITGFGKENSTDYLYPEQLKKTVVKLISHRECQQPHYYGSEVTTKMLCAADPQWKTDSCQGDSGGPLVCSLQGRMTLTGIVSWGRGCALKDKPGVYTRVSHFLPWIRSHTKEENGLAL

SEQ ID NO: 499 - protein, 253 aa, Artificial Sequence
  UROKINASE-TYPE PLASMINOGEN ACTIVATOR (u-PA) protease domain F30Y/R35H/V38D/T39S/Y40H/V41R/S75P/L97bA/H99Q/C122 S/M157K/I163M/Q204H/K243E
IIGGEFTTIENQPWYAAIYHRHRGGSDSHRCGGSLISPCWVISATHCFIDYPKKEDYIVYLGRSRLNPNTQGEMKFEVENLILHKDYSADTAAQHNDIALLKIRSKEGRCAQPSRTIQTISLPSMYNDPQFGTSCEITGFGKENSTDYLYPEQLKKTVVKLMSHRECQQPHYYGSEVTTKMLCAADPQWKTDSCQGDSGGPLVCSLHGRMTLTGIVSWGRGCALKDKPGVYTRVSHFLPWIRSHTEEENGLAL

SEQ ID NO: 500 - protein, 253 aa, Artificial Sequence
  UROKINASE-TYPE PLASMINOGEN ACTIVATOR (u-PA) protease domain F30Y/R35H/V38D/T39S/Y40L/V41R/L97bA/H99Q/C122S/T14 7S/M157K
IIGGEFTTIENQPWYAAIYHRHRGGSDSLRCGGSLISPCWVISATHCFIDYPKKEDYIVYLGRSRLNSNTQGEMKFEVENLILHKDYSADTAAQHNDIALLKIRSKEGRCAQPSRTIQTISLPSMYNDPQFGTSCEITGFGKENSSDYLYPEQLKKTVVKLISHRECQQPHYYGSEVTTKMLCAADPQWKTDSCQGDSGGPLVCSLQGRMTLTGIVSWGRGCALKDKPGVYTRVSHFLPWIRSHTKEENGLAL

SEQ ID NO: 501 - protein, 253 aa, Artificial Sequence
  UROKINASE-TYPE PLASMINOGEN ACTIVATOR (u-PA) protease domain F30Y/R36S/V38H/Y40L/V41R/N76K/L97bA/H99Q/C122S/M15 7K
IIGGEFTTIENQPWYAAIYRSHRGGSHTLRCGGSLISPCWVISATHCFIDYPKKEDYIVYLGRSRLNSKTQGEMKFEVENLILHKDYSADTAAQHNDIALLKIRSKEGRCAQPSRTIQTISLPSMYNDPQFGTSCEITGFGKENSTDYLYPEQLKKTVVKLISHRECQQPHYYGSEVTTKMLCAADPQWKTDSCQGDSGGPLVCSLQGRMTLTGIVSWGRGCALKDKPGVYTRVSHFLPWIRSHTKEENGLAL

SEQ ID NO: 502 - protein, 253 aa, Artificial Sequence
  UROKINASE-TYPE PLASMINOGEN ACTIVATOR (u-PA) protease domain F30H/V38D/V41R/L73Q/L97bA/H99Q/E110bD/C122S/Y149N/ Y151L/M157K
IIGGEFTTIENQPWHAAIYRRHRGGSDTYRCGGSLISPCWVISATHCFIDYPKKEDYIVYLGRSRQNSNTQGEMKFEVENLILHKDYSADTAAQHNDIALLKIRSKDGRCAQPSRTIQTISLPSMYNDPQFGTSCEITGFGKENSTDNLLPEQLKKTVVKLISHRECQQPHYYGSEVTTKMLCAADPQWKTDSCQGDSGGPLVCSLQGRMTLTGIVSWGRGCALKDKPGVYTRVSHFLPWIRSHTKEENGLAL

SEQ ID NO: 503 - protein, 253 aa, Artificial Sequence
  UROKINASE-TYPE PLASMINOGEN ACTIVATOR (u-PA) protease domain F30H/R36L/V38E/V41R/K82R/L97bA/H99Q/C122S/Y151L/M1 57K
IIGGEFTTIENQPWHAAIYRLHRGGSETYRCGGSLISPCWVISATHCFIDYPKKEDYIVYLGRSRLNSNTQGEMRFEVENLILHKDYSADTAAQHNDIALLKIRSKEGRCAQPSRTIQTISLPSMYNDPQFGTSCEITGFGKENSTDYLLPEQLKKTVVKLISHRECQQPHYYGSEVTTKMLCAADPQWKTDSCQGDSGGPLVCSLQGRMTLTGIVSWGRGCALKDKPGVYTRVSHFLPWIRSHTKEENGLAL

SEQ ID NO: 504 - protein, 253 aa, Artificial Sequence
  UROKINASE-TYPE PLASMINOGEN ACTIVATOR (u-PA) protease domain F30H/R35H/V38D/V41R/K61E/L97bA/H99Q/C122S/Y151L/M1 57K/R206H
IIGGEFTTIENQPWHAAIYHRHRGGSDTYRCGGSLISPCWVISATHCFIDYPEKEDYIVYLGRSRLNSNTQGEMKFEVENLILHKDYSADTAAQHNDIALLKIRSKEGRCAQPSRTIQTISLPSMYNDPQFGTSCEITGFGKENSTDYLLPEQLKKTVVKLISHRECQQPHYYGSEVTTKMLCAADPQWKTDSCQGDSGGPLVCSLQGHMTLTGIVSWGRGCALKDKPGVYTRVSHFLPWIRSHTKEENGLAL

SEQ ID NO: 505 - protein, 253 aa, Artificial Sequence
  UROKINASE-TYPE PLASMINOGEN ACTIVATOR (u-PA) protease domain I17V/F30H/V38D/V41R/L97bA/H99Q/C122S/Y151L/M157K
IVGGEFTTIENQPWHAAIYRRHRGGSDTYRCGGSLISPCWVISATHCFIDYPKKEDYIVYLGRSRLNSNTQGEMKFEVENLILHKDYSADTAAQHNDIALLKIRSKEGRCAQPSRTIQTISLPSMYNDPQFGTSCEITGFGKENSTDYLLPEQLKKTVVKLISHRECQQPHYYGSEVTTKMLCAADPQWKTDSCQGDSGGPLVCSLQGRMTLTGIVSWGRGCALKDKPGVYTRVSHFLPWIRSHTKEENGLAL

SEQ ID NO: 506 - protein, 253 aa, Artificial Sequence
  UROKINASE-TYPE PLASMINOGEN ACTIVATOR (u-PA) protease domain F30H/R35S/V38E/V41R/Y60bH/L97bA/H99Q/C122S/Y151L/M 157K
IIGGEFTTIENQPWHAAIYSRHRGGSETYRCGGSLISPCWVISATHCFIDHPKKEDYIVYLGRSRLNSNTQGEMKFEVENLILHKDYSADTAAQHNDIALLKIRSKEGRCAQPSRTIQTISLPSMYNDPQFGTSCEITGFGKENSTDYLLPEQLKKTVVKLISHRECQQPHYYGSEVTTKMLCAADPQWKTDSCQGDSGGPLVCSLQGRMTLTGIVSWGRGCALKDKPGVYTRVSHFLPWIRSHTKEENGLAL

SEQ ID NO: 507 - protein, 253 aa, Artificial Sequence
  UROKINASE-TYPE PLASMINOGEN ACTIVATOR (u-PA) protease domain F30H/R36H/V38D/V41R/T56A/L97bA/H99Q/C122S/Y151L/M1 57K
IIGGEFTTIENQPWHAAIYRHHRGGSDTYRCGGSLISPCWVISAAHCFIDYPKKEDYIVYLGRSRLNSNTQGEMKFEVENLILHKDYSADTAAQHNDIALLKIRSKEGRCAQPSRTIQTISLPSMYNDPQFGTSCEITGFGKENSTDYLLPEQLKKTVVKLISHRECQQPHYYGSEVTTKMLCAADPQWKTDSCQGDSGGPLVCSLQGRMTLTGIVSWGRGCALKDKPGVYTRVSHFLPWIRSHTKEENGLAL

SEQ ID NO: 508 - protein, 253 aa, Artificial Sequence
  UROKINASE-TYPE PLASMINOGEN ACTIVATOR (u-PA) protease domain F30H/R35Q/H37T/V38D/V41R/L97bA/H99Q/C122S/Y149I/Y1 51L/M157K/R217D
IIGGEFTTIENQPWHAAIYQRTRGGSDTYRCGGSLISPCWVISATHCFIDYPKKEDYIVYLGRSRLNSNTQGEMKFEVENLILHKDYSADTAAQHNDIALLKIRSKEGRCAQPSRTIQTISLPSMYNDPQFGTSCEITGFGKENSTDILLPEQLKKTVVKLISHRECQQPHYYGSEVTTKMLCAADPQWKTDSCQGDSGGPLVCSLQGRMTLTGIVSWGDGCALKDKPGVYTRVSHFLPWIRSHTKEENGLAL

SEQ ID NO: 509 - protein, 253 aa, Artificial Sequence
  UROKINASE-TYPE PLASMINOGEN ACTIVATOR (u-PA) protease domain F30H/R35Q/H37W/V38D/V41R/D60aE/Y60bS/L97bA/H99Q/C1 22S/Y149L/Y151L/M157K
IIGGEFTTIENQPWHAAIYQRWRGGSDTYRCGGSLISPCWVISATHCFIESPKKEDYIVYLGRSRLNSNTQGEMKFEVENLILHKDYSADTAAQHNDIALLKIRSKEGRCAQPSRTIQTISLPSMYNDPQFGTSCEITGFGKENSTDLLLPEQLKKTVVKLISHRECQQPHYYGSEVTTKMLCAADPQWKTDSCQGDSGGPLVCSLQGRMTLTGIVSWGRGCALKDKPGVYTRVSHFLPWIRSHTKEENGLAL

SEQ ID NO: 510 - protein, 253 aa, Artificial Sequence
  UROKINASE-TYPE PLASMINOGEN ACTIVATOR (u-PA) protease domain F30H/R35Q/H37Q/V38D/V41R/A96D/L97bA/H99Q/C122S/Y14 9L/Y151L/M157K/R217D
IIGGEFTTIENQPWHAAIYQRQRGGSDTYRCGGSLISPCWVISATHCFIDYPKKEDYIVYLGRSRLNSNTQGEMKFEVENLILHKDYSDDTAAQHNDIALLKIRSKEGRCAQPSRTIQTISLPSMYNDPQFGTSCEITGFGKENSTDLLLPEQLKKTVVKLISHRECQQPHYYGSEVTTKMLCAADPQWKTDSCQGDSGGPLVCSLQGRMTLTGIVSWGDGCALKDKPGVYTRVSHFLPWIRSHTKEENGLAL

SEQ ID NO: 511 - protein, 253 aa, Artificial Sequence
  UROKINASE-TYPE PLASMINOGEN ACTIVATOR (u-PA) protease domain F30H/R35H/H37I/V38D/V41R/L97bA/H99Q/C122S/Y149W/Y1 51L/M157K/R217S
IIGGEFTTIENQPWHAAIYHRIRGGSDTYRCGGSLISPCWVISATHCFIDYPKKEDYIVYLGRSRLNSNTQGEMKFEVENLILHKDYSADTAAQHNDIALLKIRSKEGRCAQPSRTIQTISLPSMYNDPQFGTSCEITGFGKENSTDWLLPEQLKKTVVKLISHRECQQPHYYGSEVTTKMLCAADPQWKTDSCQGDSGGPLVCSLQGRMTLTGIVSWGSGCALKDKPGVYTRVSHFLPWIRSHTKEENGLAL

SEQ ID NO: 512 - protein, 253 aa, Artificial Sequence
  UROKINASE-TYPE PLASMINOGEN ACTIVATOR (u-PA) protease domain F30H/R35T/H37M/V38D/V41R/D60aS/Y60bT/L97bA/H99Q/A1 12V/C122S/Y151L/M157K/R217T
IIGGEFTTIENQPWHAAIYTRMRGGSDTYRCGGSLISPCWVISATHCFISTPKKEDYIVYLGRSRLNSNTQGEMKFEVENLILHKDYSADTAAQHNDIALLKIRSKEGRCVQPSRTIQTISLPSMYNDPQFGTSCEITGFGKENSTDYLLPEQLKKTVVKLISHRECQQPHYYGSEVTTKMLCAADPQWKTDSCQGDSGGPLVCSLQGRMTLTGIVSWGTGCALKDKPGVYTRVSHFLPWIRSHTKEENGLAL

SEQ ID NO: 513 - protein, 253 aa, Artificial Sequence
  UROKINASE-TYPE PLASMINOGEN ACTIVATOR (u-PA) protease domain F30H/R35Q/H37W/V38D/V41R/L97bA/H99Q/C122S/Y151L/M1 57K
IIGGEFTTIENQPWHAAIYQRWRGGSDTYRCGGSLISPCWVISATHCFIDYPKKEDYIVYLGRSRLNSNTQGEMKFEVENLILHKDYSADTAAQHNDIALLKIRSKEGRCAQPSRTIQTISLPSMYNDPQFGTSCEITGFGKENSTDYLLPEQLKKTVVKLISHRECQQPHYYGSEVTTKMLCAADPQWKTDSCQGDSGGPLVCSLQGRMTLTGIVSWGRGCALKDKPGVYTRVSHFLPWIRSHTKEENGLAL

SEQ ID NO: 514 - protein, 253 aa, Artificial Sequence
  UROKINASE-TYPE PLASMINOGEN ACTIVATOR (u-PA) protease domain F30H/R35L/H37D/V38D/V41R/L97bA/H99Q/C122S/Y151L/M1 57K/R217E
IIGGEFTTIENQPWHAAIYLRDRGGSDTYRCGGSLISPCWVISATHCFIDYPKKEDYIVYLGRSRLNSNTQGEMKFEVENLILHKDYSADTAAQHNDIALLKIRSKEGRCAQPSRTIQTISLPSMYNDPQFGTSCEITGFGKENSTDYLLPEQLKKTVVKLISHRECQQPHYYGSEVTTKMLCAADPQWKTDSCQGDSGGPLVCSLQGRMTLTGIVSWGEGCALKDKPGVYTRVSHFLPWIRSHTKEENGLAL

SEQ ID NO: 515 - protein, 253 aa, Artificial Sequence
  UROKINASE-TYPE PLASMINOGEN ACTIVATOR (u-PA) protease domain F30H/R35Q/H37T/V38D/V41R/L97bA/H99Q/C122S/Y151L/M1 57K
IIGGEFTTIENQPWHAAIYQRTRGGSDTYRCGGSLISPCWVISATHCFIDYPKKEDYIVYLGRSRLNSNTQGEMKFEVENLILHKDYSADTAAQHNDIALLKIRSKEGRCAQPSRTIQTISLPSMYNDPQFGTSCEITGFGKENSTDYLLPEQLKKTVVKLISHRECQQPHYYGSEVTTKMLCAADPQWKTDSCQGDSGGPLVCSLQGRMTLTGIVSWGRGCALKDKPGVYTRVSHFLPWIRSHTKEENGLAL

SEQ ID NO: 516 - protein, 253 aa, Artificial Sequence
  UROKINASE-TYPE PLASMINOGEN ACTIVATOR (u-PA) protease domain F30H/R35Q/V38D/V41R/L97bA/H99Q/C122S/Y151L/M157K
IIGGEFTTIENQPWHAAIYQRHRGGSDTYRCGGSLISPCWVISATHCFIDYPKKEDYIVYLGRSRLNSNTQGEMKFEVENLILHKDYSADTAAQHNDIALLKIRSKEGRCAQPSRTIQTISLPSMYNDPQFGTSCEITGFGKENSTDYLLPEQLKKTVVKLISHRECQQPHYYGSEVTTKMLCAADPQWKTDSCQGDSGGPLVCSLQGRMTLTGIVSWGRGCALKDKPGVYTRVSHFLPWIRSHTKEENGLAL

SEQ ID NO: 517 - protein, 253 aa, Artificial Sequence
  UROKINASE-TYPE PLASMINOGEN ACTIVATOR (u-PA) protease domain F30H/R35Q/H37W/V38D/V41R/D60aE/L97bA/H99Q/C122S/Y1 49L/Y151L/M157K/R217D
IIGGEFTTIENQPWHAAIYQRWRGGSDTYRCGGSLISPCWVISATHCFIEYPKKEDYIVYLGRSRLNSNTQGEMKFEVENLILHKDYSADTAAQHNDIALLKIRSKEGRCAQPSRTIQTISLPSMYNDPQFGTSCEITGFGKENSTDLLLPEQLKKTVVKLISHRECQQPHYYGSEVTTKMLCAADPQWKTDSCQGDSGGPLVCSLQGRMTLTGIVSWGDGCALKDKPGVYTRVSHFLPWIRSHTKEENGLAL

SEQ ID NO: 518 - protein, 253 aa, Artificial Sequence
  UROKINASE-TYPE PLASMINOGEN ACTIVATOR (u-PA) protease domain F30H/R35Q/V38D/V41R/Y60bE/L97bA/H99Q/C122S/Y149N/Y 151L/M157K
IIGGEFTTIENQPWHAAIYQRHRGGSDTYRCGGSLISPCWVISATHCFIDEPKKEDYIVYLGRSRLNSNTQGEMKFEVENLILHKDYSADTAAQHNDIALLKIRSKEGRCAQPSRTIQTISLPSMYNDPQFGTSCEITGFGKENSTDNLLPEQLKKTVVKLISHRECQQPHYYGSEVTTKMLCAADPQWKTDSCQGDSGGPLVCSLQGRMTLTGIVSWGRGCALKDKPGVYTRVSHFLPWIRSHTKEENGLAL

SEQ ID NO: 519 - protein, 253 aa, Artificial Sequence
  UROKINASE-TYPE PLASMINOGEN ACTIVATOR (u-PA) protease domain F30Y/R35Q/V38D/Y40H/V41R/L97bA/H99Q/C122S/Y149W/M1 57K/R217D
IIGGEFTTIENQPWYAAIYQRHRGGSDTHRCGGSLISPCWVISATHCFIDYPKKEDYIVYLGRSRLNSNTQGEMKFEVENLILHKDYSADTAAQHNDIALLKIRSKEGRCAQPSRTIQTISLPSMYNDPQFGTSCEITGFGKENSTDWLYPEQLKKTVVKLISHRECQQPHYYGSEVTTKMLCAADPQWKTDSCQGDSGGPLVCSLQGRMTLTGIVSWGDGCALKDKPGVYTRVSHFLPWIRSHTKEENGLAL

SEQ ID NO: 520 - protein, 253 aa, Artificial Sequence
  UROKINASE-TYPE PLASMINOGEN ACTIVATOR (u-PA) protease domain F30Y/R35Q/H37W/V38D/Y40H/V41R/Y60bN/L97bA/H99Q/C12 2S/Y149H/M157K
IIGGEFTTIENQPWYAAIYQRWRGGSDTHRCGGSLISPCWVISATHCFIDNPKKEDYIVYLGRSRLNSNTQGEMKFEVENLILHKDYSADTAAQHNDIALLKIRSKEGRCAQPSRTIQTISLPSMYNDPQFGTSCEITGFGKENSTDHLYPEQLKKTVVKLISHRECQQPHYYGSEVTTKMLCAADPQWKTDSCQGDSGGPLVCSLQGRMTLTGIVSWGRGCALKDKPGVYTRVSHFLPWIRSHTKEENGLAL

SEQ ID NO: 521 - protein, 253 aa, Artificial Sequence
  UROKINASE-TYPE PLASMINOGEN ACTIVATOR (u-PA) protease domain F30Y/R35Q/H37T/V38D/Y40H/V41R/L97bA/H99Q/C122S/Y14 9I/M157K
IIGGEFTTIENQPWYAAIYQRTRGGSDTHRCGGSLISPCWVISATHCFIDYPKKEDYIVYLGRSRLNSNTQGEMKFEVENLILHKDYSADTAAQHNDIALLKIRSKEGRCAQPSRTIQTISLPSMYNDPQFGTSCEITGFGKENSTDILYPEQLKKTVVKLISHRECQQPHYYGSEVTTKMLCAADPQWKTDSCQGDSGGPLVCSLQGRMTLTGIVSWGRGCALKDKPGVYTRVSHFLPWIRSHTKEENGLAL

SEQ ID NO: 522 - protein, 253 aa, Artificial Sequence
  UROKINASE-TYPE PLASMINOGEN ACTIVATOR (u-PA) protease domain F30Y/R35Q/H37T/V38D/Y40H/V41R/D60aE/Y60bN/L97bA/H9 9Q/C122S/Y149H/M157K
IIGGEFTTIENQPWYAAIYQRTRGGSDTHRCGGSLISPCWVISATHCFIENPKKEDYIVYLGRSRLNSNTQGEMKFEVENLILHKDYSADTAAQHNDIALLKIRSKEGRCAQPSRTIQTISLPSMYNDPQFGTSCEITGFGKENSTDHLYPEQLKKTVVKLISHRECQQPHYYGSEVTTKMLCAADPQWKTDSCQGDSGGPLVCSLQGRMTLTGIVSWGRGCALKDKPGVYTRVSHFLPWIRSHTKEENGLAL

SEQ ID NO: 523 - protein, 253 aa, Artificial Sequence
  UROKINASE-TYPE PLASMINOGEN ACTIVATOR (u-PA) protease domain F30Y/R35H/V38D/Y40H/V41R/L97bA/H99Q/C122S/M157K
IIGGEFTTIENQPWYAAIYHRHRGGSDTHRCGGSLISPCWVISATHCFIDYPKKEDYIVYLGRSRLNSNTQGEMKFEVENLILHKDYSADTAAQHNDIALLKIRSKEGRCAQPSRTIQTISLPSMYNDPQFGTSCEITGFGKENSTDYLYPEQLKKTVVKLISHRECQQPHYYGSEVTTKMLCAADPQWKTDSCQGDSGGPLVCSLQGRMTLTGIVSWGRGCALKDKPGVYTRVSHFLPWIRSHTKEENGLAL

SEQ ID NO: 524 - protein, 253 aa, Artificial Sequence
  UROKINASE-TYPE PLASMINOGEN ACTIVATOR (u-PA) protease domain F30Y/R35H/V38D/Y40H/V41R/T56A/L97bV/H99Q/R116S/C12 2S/M157K/T210N
IIGGEFTTIENQPWYAAIYHRHRGGSDTHRCGGSLISPCWVISAAHCFIDYPKKEDYIVYLGRSRLNSNTQGEMKFEVENLILHKDYSADTVAQHNDIALLKIRSKEGRCAQPSSTIQTISLPSMYNDPQFGTSCEITGFGKENSTDYLYPEQLKKTVVKLISHRECQQPHYYGSEVTTKMLCAADPQWKTDSCQGDSGGPLVCSLQGRMTLNGIVSWGRGCALKDKPGVYTRVSHFLPWIRSHTKEENGLAL

SEQ ID NO: 525 - protein, 253 aa, Artificial Sequence
  UROKINASE-TYPE PLASMINOGEN ACTIVATOR (u-PA) protease domain F30Y/R35Q/V38D/Y40H/V41R/L97bA/H99Q/C122S/E153D/M1 57K
IIGGEFTTIENQPWYAAIYQRHRGGSDTHRCGGSLISPCWVISATHCFIDYPKKEDYIVYLGRSRLNSNTQGEMKFEVENLILHKDYSADTAAQHNDIALLKIRSKEGRCAQPSRTIQTISLPSMYNDPQFGTSCEITGFGKENSTDYLYPDQLKKTVVKLISHRECQQPHYYGSEVTTKMLCAADPQWKTDSCQGDSGGPLVCSLQGRMTLTGIVSWGRGCALKDKPGVYTRVSHFLPWIRSHTKEENGLAL

SEQ ID NO: 526 - protein, 253 aa, Artificial Sequence
  UROKINASE-TYPE PLASMINOGEN ACTIVATOR (u-PA) protease domain F30Y/V38D/Y40H/V41R/L97bA/H99Q/C122S/D148N/M157K/T 188S
IIGGEFTTIENQPWYAAIYRRHRGGSDTHRCGGSLISPCWVISATHCFIDYPKKEDYIVYLGRSRLNSNTQGEMKFEVENLILHKDYSADTAAQHNDIALLKIRSKEGRCAQPSRTIQTISLPSMYNDPQFGTSCEITGFGKENSTNYLYPEQLKKTVVKLISHRECQQPHYYGSEVTTKMLCAADPQWKSDSCQGDSGGPLVCSLQGRMTLTGIVSWGRGCALKDKPGVYTRVSHFLPWIRSHTKEENGLAL

SEQ ID NO: 527 - protein, 253 aa, Artificial Sequence
  UROKINASE-TYPE PLASMINOGEN ACTIVATOR (u-PA) protease domain F30Y/V38D/Y40H/V41R/L97bA/H99Q/C122S/M157K/K223N/P 236S
IIGGEFTTIENQPWYAAIYRRHRGGSDTHRCGGSLISPCWVISATHCFIDYPKKEDYIVYLGRSRLNSNTQGEMKFEVENLILHKDYSADTAAQHNDIALLKIRSKEGRCAQPSRTIQTISLPSMYNDPQFGTSCEITGFGKENSTDYLYPEQLKKTVVKLISHRECQQPHYYGSEVTTKMLCAADPQWKTDSCQGDSGGPLVCSLQGRMTLTGIVSWGRGCALNDKPGVYTRVSHFLSWIRSHTKEENGLAL

SEQ ID NO: 528 - protein, 253 aa, Artificial Sequence
  UROKINASE-TYPE PLASMINOGEN ACTIVATOR (u-PA) protease domain F30Y/V38D/Y40M/V41R/L97bA/H99Q/C122S/Y151L/M157R/Q 192M
IIGGEFTTIENQPWYAAIYRRHRGGSDTMRCGGSLISPCWVISATHCFIDYPKKEDYIVYLGRSRLNSNTQGEMKFEVENLILHKDYSADTAAQHNDIALLKIRSKEGRCAQPSRTIQTISLPSMYNDPQFGTSCEITGFGKENSTDYLLPEQLKRTVVKLISHRECQQPHYYGSEVTTKMLCAADPQWKTDSCMGDSGGPLVCSLQGRMTLTGIVSWGRGCALKDKPGVYTRVSHFLPWIRSHTKEENGLAL

SEQ ID NO: 529 - protein, 253 aa, Artificial Sequence
  UROKINASE-TYPE PLASMINOGEN ACTIVATOR (u-PA) protease domain F30H/V38D/L97bA/H99Q/C122S/Y151L/M157L/Q192H
IIGGEFTTIENQPWHAAIYRRHRGGSDTYVCGGSLISPCWVISATHCFIDYPKKEDYIVYLGRSRLNSNTQGEMKFEVENLILHKDYSADTAAQHNDIALLKIRSKEGRCAQPSRTIQTISLPSMYNDPQFGTSCEITGFGKENSTDYLLPEQLKLTVVKLISHRECQQPHYYGSEVTTKMLCAADPQWKTDSCHGDSGGPLVCSLQGRMTLTGIVSWGRGCALKDKPGVYTRVSHFLPWIRSHTKEENGLAL

SEQ ID NO: 530 - protein, 253 aa, Artificial Sequence
  UROKINASE-TYPE PLASMINOGEN ACTIVATOR (u-PA) protease domain F30H/V38D/L97bA/H99Q/C122S/Y151L/M157S/Q192L
IIGGEFTTIENQPWHAAIYRRHRGGSDTYVCGGSLISPCWVISATHCFIDYPKKEDYIVYLGRSRLNSNTQGEMKFEVENLILHKDYSADTAAQHNDIALLKIRSKEGRCAQPSRTIQTISLPSMYNDPQFGTSCEITGFGKENSTDYLLPEQLKSTVVKLISHRECQQPHYYGSEVTTKMLCAADPQWKTDSCLGDSGGPLVCSLQGRMTLTGIVSWGRGCALKDKPGVYTRVSHFLPWIRSHTKEENGLAL

SEQ ID NO: 531 - protein, 253 aa, Artificial Sequence
  UROKINASE-TYPE PLASMINOGEN ACTIVATOR (u-PA) protease domain F30N/V38D/Y40F/V41R/L97bA/H99Q/C122S/Y151L/M157S/Q 192H
IIGGEFTTIENQPWNAAIYRRHRGGSDTFRCGGSLISPCWVISATHCFIDYPKKEDYIVYLGRSRLNSNTQGEMKFEVENLILHKDYSADTAAQHNDIALLKIRSKEGRCAQPSRTIQTISLPSMYNDPQFGTSCEITGFGKENSTDYLLPEQLKSTVVKLISHRECQQPHYYGSEVTTKMLCAADPQWKTDSCHGDSGGPLVCSLQGRMTLTGIVSWGRGCALKDKPGVYTRVSHFLPWIRSHTKEENGLAL

SEQ ID NO: 532 - protein, 253 aa, Artificial Sequence
  UROKINASE-TYPE PLASMINOGEN ACTIVATOR (u-PA) protease domain F30H/V38D/Y40H/V41Q/L97bA/H99Q/C122S/Q192H
IIGGEFTTIENQPWHAAIYRRHRGGSDTHQCGGSLISPCWVISATHCFIDYPKKEDYIVYLGRSRLNSNTQGEMKFEVENLILHKDYSADTAAQHNDIALLKIRSKEGRCAQPSRTIQTISLPSMYNDPQFGTSCEITGFGKENSTDYLYPEQLKMTVVKLISHRECQQPHYYGSEVTTKMLCAADPQWKTDSCHGDSGGPLVCSLQGRMTLTGIVSWGRGCALKDKPGVYTRVSHFLPWIRSHTKEENGLAL

SEQ ID NO: 533 - protein, 253 aa, Artificial Sequence
  UROKINASE-TYPE PLASMINOGEN ACTIVATOR (u-PA) protease domain F30Q/V38D/Y40L/V41R/L97bA/H99Q/C122S/Y151H/M157R/Q 192Y
IIGGEFTTIENQPWQAAIYRRHRGGSDTLRCGGSLISPCWVISATHCFIDYPKKEDYIVYLGRSRLNSNTQGEMKFEVENLILHKDYSADTAAQHNDIALLKIRSKEGRCAQPSRTIQTISLPSMYNDPQFGTSCEITGFGKENSTDYLHPEQLKRTVVKLISHRECQQPHYYGSEVTTKMLCAADPQWKTDSCYGDSGGPLVCSLQGRMTLTGIVSWGRGCALKDKPGVYTRVSHFLPWIRSHTKEENGLAL

SEQ ID NO: 534 - protein, 253 aa, Artificial Sequence
  UROKINASE-TYPE PLASMINOGEN ACTIVATOR (u-PA) protease domain R35S/V38D/L97bA/H99Q/C122S/Y151L/M157Y
IIGGEFTTIENQPWFAAIYSRHRGGSDTYVCGGSLISPCWVISATHCFIDYPKKEDYIVYLGRSRLNSNTQGEMKFEVENLILHKDYSADTAAQHNDIALLKIRSKEGRCAQPSRTIQTISLPSMYNDPQFGTSCEITGFGKENSTDYLLPEQLKYTVVKLISHRECQQPHYYGSEVTTKMLCAADPQWKTDSCQGDSGGPLVCSLQGRMTLTGIVSWGRGCALKDKPGVYTRVSHFLPWIRSHTKEENGLAL

SEQ ID NO: 535 - protein, 253 aa, Artificial Sequence
  UROKINASE-TYPE PLASMINOGEN ACTIVATOR (u-PA) protease domain F30H/V38D/V41R/L97bA/H99Q/C122S/Y151L/M157T
IIGGEFTTIENQPWHAAIYRRHRGGSDTYRCGGSLISPCWVISATHCFIDYPKKEDYIVYLGRSRLNSNTQGEMKFEVENLILHKDYSADTAAQHNDIALLKIRSKEGRCAQPSRTIQTISLPSMYNDPQFGTSCEITGFGKENSTDYLLPEQLKTTVVKLISHRECQQPHYYGSEVTTKMLCAADPQWKTDSCQGDSGGPLVCSLQGRMTLTGIVSWGRGCALKDKPGVYTRVSHFLPWIRSHTKEENGLAL

SEQ ID NO: 536 - protein, 253 aa, Artificial Sequence
  UROKINASE-TYPE PLASMINOGEN ACTIVATOR (u-PA) protease domain R37aL/V38D/L97bA/H99Q/C122S/Y151L/M157S
IIGGEFTTIENQPWFAAIYRRHLGGSDTYVCGGSLISPCWVISATHCFIDYPKKEDYIVYLGRSRLNSNTQGEMKFEVENLILHKDYSADTAAQHNDIALLKIRSKEGRCAQPSRTIQTISLPSMYNDPQFGTSCEITGFGKENSTDYLLPEQLKSTVVKLISHRECQQPHYYGSEVTTKMLCAADPQWKTDSCQGDSGGPLVCSLQGRMTLTGIVSWGRGCALKDKPGVYTRVSHFLPWIRSHTKEENGLAL

SEQ ID NO: 537 - protein, 253 aa, Artificial Sequence
  UROKINASE-TYPE PLASMINOGEN ACTIVATOR (u-PA) protease domain F30N/V38D/V41L/L97bA/H99Q/C122S/Y151L/M157R
IIGGEFTTIENQPWNAAIYRRHRGGSDTYLCGGSLISPCWVISATHCFIDYPKKEDYIVYLGRSRLNSNTQGEMKFEVENLILHKDYSADTAAQHNDIALLKIRSKEGRCAQPSRTIQTISLPSMYNDPQFGTSCEITGFGKENSTDYLLPEQLKRTVVKLISHRECQQPHYYGSEVTTKMLCAADPQWKTDSCQGDSGGPLVCSLQGRMTLTGIVSWGRGCALKDKPGVYTRVSHFLPWIRSHTKEENGLAL

SEQ ID NO: 538 - protein, 253 aa, Artificial Sequence
  UROKINASE-TYPE PLASMINOGEN ACTIVATOR (u-PA) protease domain F30Y/V38D/Y40F/V41L/L97bA/H99Q/C122S/Y151L/M157R
IIGGEFTTIENQPWYAAIYRRHRGGSDTFLCGGSLISPCWVISATHCFIDYPKKEDYIVYLGRSRLNSNTQGEMKFEVENLILHKDYSADTAAQHNDIALLKIRSKEGRCAQPSRTIQTISLPSMYNDPQFGTSCEITGFGKENSTDYLLPEQLKRTVVKLISHRECQQPHYYGSEVTTKMLCAADPQWKTDSCQGDSGGPLVCSLQGRMTLTGIVSWGRGCALKDKPGVYTRVSHFLPWIRSHTKEENGLAL

SEQ ID NO: 539 - protein, 253 aa, Artificial Sequence
  UROKINASE-TYPE PLASMINOGEN ACTIVATOR (u-PA) protease domain F30H/V38D/Y40F/V41R/L97bA/H99Q/C122S/Y151L/M157R/Q 192H
IIGGEFTTIENQPWHAAIYRRHRGGSDTFRCGGSLISPCWVISATHCFIDYPKKEDYIVYLGRSRLNSNTQGEMKFEVENLILHKDYSADTAAQHNDIALLKIRSKEGRCAQPSRTIQTISLPSMYNDPQFGTSCEITGFGKENSTDYLLPEQLKRTVVKLISHRECQQPHYYGSEVTTKMLCAADPQWKTDSCHGDSGGPLVCSLQGRMTLTGIVSWGRGCALKDKPGVYTRVSHFLPWIRSHTKEENGLAL

SEQ ID NO: 540 - protein, 253 aa, Artificial Sequence
  UROKINASE-TYPE PLASMINOGEN ACTIVATOR (u-PA) protease domain F30Y/R36H/V38D/Y40H/V41R/L97bA/H99Q/C122S/M157K/T2 10S
IIGGEFTTIENQPWYAAIYRHHRGGSDTHRCGGSLISPCWVISATHCFIDYPKKEDYIVYLGRSRLNSNTQGEMKFEVENLILHKDYSADTAAQHNDIALLKIRSKEGRCAQPSRTIQTISLPSMYNDPQFGTSCEITGFGKENSTDYLYPEQLKKTVVKLISHRECQQPHYYGSEVTTKMLCAADPQWKTDSCQGDSGGPLVCSLQGRMTLSGIVSWGRGCALKDKPGVYTRVSHFLPWIRSHTKEENGLAL

SEQ ID NO: 541 - protein, 253 aa, Artificial Sequence
  UROKINASE-TYPE PLASMINOGEN ACTIVATOR (u-PA) protease domain F30H/V38D/L97bA/H99Q/C122S/Y151L/M157K
IIGGEFTTIENQPWHAAIYRRHRGGSDTYVCGGSLISPCWVISATHCFIDYPKKEDYIVYLGRSRLNSNTQGEMKFEVENLILHKDYSADTAAQHNDIALLKIRSKEGRCAQPSRTIQTISLPSMYNDPQFGTSCEITGFGKENSTDYLLPEQLKKTVVKLISHRECQQPHYYGSEVTTKMLCAADPQWKTDSCQGDSGGPLVCSLQGRMTLTGIVSWGRGCALKDKPGVYTRVSHFLPWIRSHTKEENGLAL

SEQ ID NO: 542 - protein, 253 aa, Artificial Sequence
  UROKINASE-TYPE PLASMINOGEN ACTIVATOR (u-PA) protease domain N26D/F30Y/V38D/Y40H/V41R/I65T/L97bA/H99Q/C122S/M12 6I/M157K
IIGGEFTTIEDQPWYAAIYRRHRGGSDTHRCGGSLISPCWVISATHCFIDYPKKEDYTVYLGRSRLNSNTQGEMKFEVENLILHKDYSADTAAQHNDIALLKIRSKEGRCAQPSRTIQTISLPSIYNDPQFGTSCEITGFGKENSTDYLYPEQLKKTVVKLISHRECQQPHYYGSEVTTKMLCAADPQWKTDSCQGDSGGPLVCSLQGRMTLTGIVSWGRGCALKDKPGVYTRVSHFLPWIRSHTKEENGLAL

SEQ ID NO: 543 - protein, 253 aa, Artificial Sequence
  UROKINASE-TYPE PLASMINOGEN ACTIVATOR (u-PA) protease domain F30Y/V38D/Y40L/V41R/L97bA/H99Q/C122S/Y151L/M157K/Q 192H
IIGGEFTTIENQPWYAAIYRRHRGGSDTLRCGGSLISPCWVISATHCFIDYPKKEDYIVYLGRSRLNSNTQGEMKFEVENLILHKDYSADTAAQHNDIALLKIRSKEGRCAQPSRTIQTISLPSMYNDPQFGTSCEITGFGKENSTDYLLPEQLKKTVVKLISHRECQQPHYYGSEVTTKMLCAADPQWKTDSCHGDSGGPLVCSLQGRMTLTGIVSWGRGCALKDKPGVYTRVSHFLPWIRSHTKEENGLAL

SEQ ID NO: 544 - protein, 253 aa, Artificial Sequence
  UROKINASE-TYPE PLASMINOGEN ACTIVATOR (u-PA) protease domain F30Y/V38D/Y40L/V41Q/L97bA/H99Q/C122S/Y151L/M157R/Q 192Y
IIGGEFTTIENQPWYAAIYRRHRGGSDTLQCGGSLISPCWVISATHCFIDYPKKEDYIVYLGRSRLNSNTQGEMKFEVENLILHKDYSADTAAQHNDIALLKIRSKEGRCAQPSRTIQTISLPSMYNDPQFGTSCEITGFGKENSTDYLLPEQLKRTVVKLISHRECQQPHYYGSEVTTKMLCAADPQWKTDSCYGDSGGPLVCSLQGRMTLTGIVSWGRGCALKDKPGVYTRVSHFLPWIRSHTKEENGLAL

SEQ ID NO: 545 - protein, 253 aa, Artificial Sequence
  UROKINASE-TYPE PLASMINOGEN ACTIVATOR (u-PA) protease domain F30Y/V38D/Y40L/V41R/L97bA/H99Q/C122S/Y151L/M157A/Q 192Y
IIGGEFTTIENQPWYAAIYRRHRGGSDTLRCGGSLISPCWVISATHCFIDYPKKEDYIVYLGRSRLNSNTQGEMKFEVENLILHKDYSADTAAQHNDIALLKIRSKEGRCAQPSRTIQTISLPSMYNDPQFGTSCEITGFGKENSTDYLLPEQLKATVVKLISHRECQQPHYYGSEVTTKMLCAADPQWKTDSCYGDSGGPLVCSLQGRMTLTGIVSWGRGCALKDKPGVYTRVSHFLPWIRSHTKEENGLAL

SEQ ID NO: 546 - protein, 253 aa, Artificial Sequence
  UROKINASE-TYPE PLASMINOGEN ACTIVATOR (u-PA) protease domain F30Y/R36S/V38D/Y40H/V41R/L97bA/H99Q/C122S/M157K
IIGGEFTTIENQPWYAAIYRSHRGGSDTHRCGGSLISPCWVISATHCFIDYPKKEDYIVYLGRSRLNSNTQGEMKFEVENLILHKDYSADTAAQHNDIALLKIRSKEGRCAQPSRTIQTISLPSMYNDPQFGTSCEITGFGKENSTDYLYPEQLKKTVVKLISHRECQQPHYYGSEVTTKMLCAADPQWKTDSCQGDSGGPLVCSLQGRMTLTGIVSWGRGCALKDKPGVYTRVSHFLPWIRSHTKEENGLAL

SEQ ID NO: 547 - protein, 253 aa, Artificial Sequence
  UROKINASE-TYPE PLASMINOGEN ACTIVATOR (u-PA) protease domain F30H/V38D/V41Q/L97bA/H99Q/C122S/Y151L/M157R
IIGGEFTTIENQPWHAAIYRRHRGGSDTYQCGGSLISPCWVISATHCFIDYPKKEDYIVYLGRSRLNSNTQGEMKFEVENLILHKDYSADTAAQHNDIALLKIRSKEGRCAQPSRTIQTISLPSMYNDPQFGTSCEITGFGKENSTDYLLPEQLKRTVVKLISHRECQQPHYYGSEVTTKMLCAADPQWKTDSCQGDSGGPLVCSLQGRMTLTGIVSWGRGCALKDKPGVYTRVSHFLPWIRSHTKEENGLAL

SEQ ID NO: 548 - protein, 253 aa, Artificial Sequence
  UROKINASE-TYPE PLASMINOGEN ACTIVATOR (u-PA) protease domain F30H/V38D/L97bA/H99Q/C122S/Y151F/M157K
IIGGEFTTIENQPWHAAIYRRHRGGSDTYVCGGSLISPCWVISATHCFIDYPKKEDYIVYLGRSRLNSNTQGEMKFEVENLILHKDYSADTAAQHNDIALLKIRSKEGRCAQPSRTIQTISLPSMYNDPQFGTSCEITGFGKENSTDYLFPEQLKKTVVKLISHRECQQPHYYGSEVTTKMLCAADPQWKTDSCQGDSGGPLVCSLQGRMTLTGIVSWGRGCALKDKPGVYTRVSHFLPWIRSHTKEENGLAL

SEQ ID NO: 549 - protein, 253 aa, Artificial Sequence
  UROKINASE-TYPE PLASMINOGEN ACTIVATOR (u-PA) protease domain F30Y/R37aH/V38D/Y40H/V41R/K61E/L97bA/H99Q/C122S/M1 57K
IIGGEFTTIENQPWYAAIYRRHHGGSDTHRCGGSLISPCWVISATHCFIDYPEKEDYIVYLGRSRLNSNTQGEMKFEVENLILHKDYSADTAAQHNDIALLKIRSKEGRCAQPSRTIQTISLPSMYNDPQFGTSCEITGFGKENSTDYLYPEQLKKTVVKLISHRECQQPHYYGSEVTTKMLCAADPQWKTDSCQGDSGGPLVCSLQGRMTLTGIVSWGRGCALKDKPGVYTRVSHFLPWIRSHTKEENGLAL

SEQ ID NO: 550 - protein, 253 aa, Artificial Sequence
  UROKINASE-TYPE PLASMINOGEN ACTIVATOR (u-PA) protease domain F30Y/R36H/V38D/Y40H/V41R/L97bA/H99L/C122S/F141L/M1 57K/T158A
IIGGEFTTIENQPWYAAIYRHHRGGSDTHRCGGSLISPCWVISATHCFIDYPKKEDYIVYLGRSRLNSNTQGEMKFEVENLILHKDYSADTAALHNDIALLKIRSKEGRCAQPSRTIQTISLPSMYNDPQFGTSCEITGLGKENSTDYLYPEQLKKAVVKLISHRECQQPHYYGSEVTTKMLCAADPQWKTDSCQGDSGGPLVCSLQGRMTLTGIVSWGRGCALKDKPGVYTRVSHFLPWIRSHTKEENGLAL

SEQ ID NO: 551 - protein, 253 aa, Artificial Sequence
  UROKINASE-TYPE PLASMINOGEN ACTIVATOR (u-PA) protease domain F30Y/R35H/V38D/Y40H/V41R/L97bA/H99Q/C122S/I138V/M1 57K
IIGGEFTTIENQPWYAAIYHRHRGGSDTHRCGGSLISPCWVISATHCFIDYPKKEDYIVYLGRSRLNSNTQGEMKFEVENLILHKDYSADTAAQHNDIALLKIRSKEGRCAQPSRTIQTISLPSMYNDPQFGTSCEVTGFGKENSTDYLYPEQLKKTVVKLISHRECQQPHYYGSEVTTKMLCAADPQWKTDSCQGDSGGPLVCSLQGRMTLTGIVSWGRGCALKDKPGVYTRVSHFLPWIRSHTKEENGLAL

SEQ ID NO: 552 - protein, 253 aa, Artificial Sequence
  UROKINASE-TYPE PLASMINOGEN ACTIVATOR (u-PA) protease domain T22I/F30Y/R35S/V38D/Y40H/V41R/L97bA/H99Q/C122S/I13 8V/M157K
IIGGEFITIENQPWYAAIYSRHRGGSDTHRCGGSLISPCWVISATHCFIDYPKKEDYIVYLGRSRLNSNTQGEMKFEVENLILHKDYSADTAAQHNDIALLKIRSKEGRCAQPSRTIQTISLPSMYNDPQFGTSCEVTGFGKENSTDYLYPEQLKKTVVKLISHRECQQPHYYGSEVTTKMLCAADPQWKTDSCQGDSGGPLVCSLQGRMTLTGIVSWGRGCALKDKPGVYTRVSHFLPWIRSHTKEENGLAL

SEQ ID NO: 553 - protein, 253 aa, Artificial Sequence
  UROKINASE-TYPE PLASMINOGEN ACTIVATOR (u-PA) protease domain F30Y/R36S/V38D/T39I/Y40H/V41R/L97bA/H99Q/C122S/S14 6P/M157K/T158S
IIGGEFTTIENQPWYAAIYRSHRGGSDIHRCGGSLISPCWVISATHCFIDYPKKEDYIVYLGRSRLNSNTQGEMKFEVENLILHKDYSADTAAQHNDIALLKIRSKEGRCAQPSRTIQTISLPSMYNDPQFGTSCEITGFGKENPTDYLYPEQLKKSVVKLISHRECQQPHYYGSEVTTKMLCAADPQWKTDSCQGDSGGPLVCSLQGRMTLTGIVSWGRGCALKDKPGVYTRVSHFLPWIRSHTKEENGLAL

SEQ ID NO: 554 - protein, 253 aa, Artificial Sequence
  UROKINASE-TYPE PLASMINOGEN ACTIVATOR (u-PA) protease domain F30Y/Y34S/R37aH/V38D/Y40H/V41R/L97bA/H99Q/C122S/Y1 49F/M157K
IIGGEFTTIENQPWYAAISRRHHGGSDTHRCGGSLISPCWVISATHCFIDYPKKEDYIVYLGRSRLNSNTQGEMKFEVENLILHKDYSADTAAQHNDIALLKIRSKEGRCAQPSRTIQTISLPSMYNDPQFGTSCEITGFGKENSTDFLYPEQLKKTVVKLISHRECQQPHYYGSEVTTKMLCAADPQWKTDSCQGDSGGPLVCSLQGRMTLTGIVSWGRGCALKDKPGVYTRVSHFLPWIRSHTKEENGLAL

SEQ ID NO: 555 - protein, 253 aa, Artificial Sequence
  UROKINASE-TYPE PLASMINOGEN ACTIVATOR (u-PA) protease domain F30Y/R35L/V38D/Y40H/V41R/L97bA/H99Q/C122S/M157K
IIGGEFTTIENQPWYAAIYLRHRGGSDTHRCGGSLISPCWVISATHCFIDYPKKEDYIVYLGRSRLNSNTQGEMKFEVENLILHKDYSADTAAQHNDIALLKIRSKEGRCAQPSRTIQTISLPSMYNDPQFGTSCEITGFGKENSTDYLYPEQLKKTVVKLISHRECQQPHYYGSEVTTKMLCAADPQWKTDSCQGDSGGPLVCSLQGRMTLTGIVSWGRGCALKDKPGVYTRVSHFLPWIRSHTKEENGLAL

SEQ ID NO: 556 - protein, 253 aa, Artificial Sequence
  UROKINASE-TYPE PLASMINOGEN ACTIVATOR (u-PA) protease domain F30Y/S37dP/V38D/Y40H/V41R/L97bA/H99Q/C122S/M157K
IIGGEFTTIENQPWYAAIYRRHRGGPDTHRCGGSLISPCWVISATHCFIDYPKKEDYIVYLGRSRLNSNTQGEMKFEVENLILHKDYSADTAAQHNDIALLKIRSKEGRCAQPSRTIQTISLPSMYNDPQFGTSCEITGFGKENSTDYLYPEQLKKTVVKLISHRECQQPHYYGSEVTTKMLCAADPQWKTDSCQGDSGGPLVCSLQGRMTLTGIVSWGRGCALKDKPGVYTRVSHFLPWIRSHTKEENGLAL

SEQ ID NO: 557 - protein, 253 aa, Artificial Sequence
  UROKINASE-TYPE PLASMINOGEN ACTIVATOR (u-PA) protease domain F30Y/R35L/V38D/Y40H/V41R/L97bA/H99Q/C122S/M157K/T1 58A
IIGGEFTTIENQPWYAAIYLRHRGGSDTHRCGGSLISPCWVISATHCFIDYPKKEDYIVYLGRSRLNSNTQGEMKFEVENLILHKDYSADTAAQHNDIALLKIRSKEGRCAQPSRTIQTISLPSMYNDPQFGTSCEITGFGKENSTDYLYPEQLKKAVVKLISHRECQQPHYYGSEVTTKMLCAADPQWKTDSCQGDSGGPLVCSLQGRMTLTGIVSWGRGCALKDKPGVYTRVSHFLPWIRSHTKEENGLAL

SEQ ID NO: 558 - protein, 253 aa, Artificial Sequence
  UROKINASE-TYPE PLASMINOGEN ACTIVATOR (u-PA) protease domain F30Y/R37aS/V38D/Y40H/V41R/E86D/L97bA/H99Q/C122S/M1 57K/F234Y
IIGGEFTTIENQPWYAAIYRRHSGGSDTHRCGGSLISPCWVISATHCFIDYPKKEDYIVYLGRSRLNSNTQGEMKFEVDNLILHKDYSADTAAQHNDIALLKIRSKEGRCAQPSRTIQTISLPSMYNDPQFGTSCEITGFGKENSTDYLYPEQLKKTVVKLISHRECQQPHYYGSEVTTKMLCAADPQWKTDSCQGDSGGPLVCSLQGRMTLTGIVSWGRGCALKDKPGVYTRVSHYLPWIRSHTKEENGLAL

SEQ ID NO: 559 - protein, 253 aa, Artificial Sequence
  UROKINASE-TYPE PLASMINOGEN ACTIVATOR (u-PA) protease domain F30Y/R37aH/V38D/Y40H/V41R/L97bA/H99Q/C122S/M157K/S 174P
IIGGEFTTIENQPWYAAIYRRHHGGSDTHRCGGSLISPCWVISATHCFIDYPKKEDYIVYLGRSRLNSNTQGEMKFEVENLILHKDYSADTAAQHNDIALLKIRSKEGRCAQPSRTIQTISLPSMYNDPQFGTSCEITGFGKENSTDYLYPEQLKKTVVKLISHRECQQPHYYGPEVTTKMLCAADPQWKTDSCQGDSGGPLVCSLQGRMTLTGIVSWGRGCALKDKPGVYTRVSHFLPWIRSHTKEENGLAL

SEQ ID NO: 560 - protein, 253 aa, Artificial Sequence
  UROKINASE-TYPE PLASMINOGEN ACTIVATOR (u-PA) protease domain F30Y/R37aS/V38D/Y40H/V41R/L97bA/H99Q/C122S/M157K
IIGGEFTTIENQPWYAAIYRRHSGGSDTHRCGGSLISPCWVISATHCFIDYPKKEDYIVYLGRSRLNSNTQGEMKFEVENLILHKDYSADTAAQHNDIALLKIRSKEGRCAQPSRTIQTISLPSMYNDPQFGTSCEITGFGKENSTDYLYPEQLKKTVVKLISHRECQQPHYYGSEVTTKMLCAADPQWKTDSCQGDSGGPLVCSLQGRMTLTGIVSWGRGCALKDKPGVYTRVSHFLPWIRSHTKEENGLAL

SEQ ID NO: 561 - protein, 253 aa, Artificial Sequence
  UROKINASE-TYPE PLASMINOGEN ACTIVATOR (u-PA) protease domain F30Y/R35L/V38D/Y40H/V41R/N76S/L97bA/H99Q/C122S/M15 7K/K187E
IIGGEFTTIENQPWYAAIYLRHRGGSDTHRCGGSLISPCWVISATHCFIDYPKKEDYIVYLGRSRLNSSTQGEMKFEVENLILHKDYSADTAAQHNDIALLKIRSKEGRCAQPSRTIQTISLPSMYNDPQFGTSCEITGFGKENSTDYLYPEQLKKTVVKLISHRECQQPHYYGSEVTTKMLCAADPQWETDSCQGDSGGPLVCSLQGRMTLTGIVSWGRGCALKDKPGVYTRVSHFLPWIRSHTKEENGLAL

SEQ ID NO: 562 - protein, 253 aa, Artificial Sequence
  UROKINASE-TYPE PLASMINOGEN ACTIVATOR (u-PA) protease domain F30Y/R35H/V38D/Y40H/V41R/L97bA/H99Q/C122S/M157K/T1 58S
IIGGEFTTIENQPWYAAIYHRHRGGSDTHRCGGSLISPCWVISATHCFIDYPKKEDYIVYLGRSRLNSNTQGEMKFEVENLILHKDYSADTAAQHNDIALLKIRSKEGRCAQPSRTIQTISLPSMYNDPQFGTSCEITGFGKENSTDYLYPEQLKKSVVKLISHRECQQPHYYGSEVTTKMLCAADPQWKTDSCQGDSGGPLVCSLQGRMTLTGIVSWGRGCALKDKPGVYTRVSHFLPWIRSHTKEENGLAL

SEQ ID NO: 563 - protein, 253 aa, Artificial Sequence
  UROKINASE-TYPE PLASMINOGEN ACTIVATOR (u-PA) protease domain F30Y/R37aS/V38D/Y40H/V41R/L97bA/H99Q/C122S/M157K/K 187Q/T208S
IIGGEFTTIENQPWYAAIYRRHSGGSDTHRCGGSLISPCWVISATHCFIDYPKKEDYIVYLGRSRLNSNTQGEMKFEVENLILHKDYSADTAAQHNDIALLKIRSKEGRCAQPSRTIQTISLPSMYNDPQFGTSCEITGFGKENSTDYLYPEQLKKTVVKLISHRECQQPHYYGSEVTTKMLCAADPQWQTDSCQGDSGGPLVCSLQGRMSLTGIVSWGRGCALKDKPGVYTRVSHFLPWIRSHTKEENGLAL

SEQ ID NO: 564 - protein, 253 aa, Artificial Sequence
  UROKINASE-TYPE PLASMINOGEN ACTIVATOR (u-PA) protease domain F30H/V38D/V41R/L97bA/H99Q/C122S/Y151L/M157K/Q192H/ R239H
IIGGEFTTIENQPWHAAIYRRHRGGSDTYRCGGSLISPCWVISATHCFIDYPKKEDYIVYLGRSRLNSNTQGEMKFEVENLILHKDYSADTAAQHNDIALLKIRSKEGRCAQPSRTIQTISLPSMYNDPQFGTSCEITGFGKENSTDYLLPEQLKKTVVKLISHRECQQPHYYGSEVTTKMLCAADPQWKTDSCHGDSGGPLVCSLQGRMTLTGIVSWGRGCALKDKPGVYTRVSHFLPWIHSHTKEENGLAL

SEQ ID NO: 565 - protein, 253 aa, Artificial Sequence
  UROKINASE-TYPE PLASMINOGEN ACTIVATOR (u-PA) protease domain F30H/R35Q/H37Y/V38D/V41R/D60aE/Y60bN/L97bA/H99Q/C1 22S/Y149R/Y151L/M157K
IIGGEFTTIENQPWHAAIYQRYRGGSDTYRCGGSLISPCWVISATHCFIENPKKEDYIVYLGRSRLNSNTQGEMKFEVENLILHKDYSADTAAQHNDIALLKIRSKEGRCAQPSRTIQTISLPSMYNDPQFGTSCEITGFGKENSTDRLLPEQLKKTVVKLISHRECQQPHYYGSEVTTKMLCAADPQWKTDSCQGDSGGPLVCSLQGRMTLTGIVSWGRGCALKDKPGVYTRVSHFLPWIRSHTKEENGLAL

SEQ ID NO: 566 - protein, 253 aa, Artificial Sequence
  UROKINASE-TYPE PLASMINOGEN ACTIVATOR (u-PA) protease domain F30Y/R35T/H37Q/V38D/Y40H/V41R/D60aE/Y60bN/L97bA/H9 9Q/C122S/Y149R/M157K
IIGGEFTTIENQPWYAAIYTRQRGGSDTHRCGGSLISPCWVISATHCFIENPKKEDYIVYLGRSRLNSNTQGEMKFEVENLILHKDYSADTAAQHNDIALLKIRSKEGRCAQPSRTIQTISLPSMYNDPQFGTSCEITGFGKENSTDRLYPEQLKKTVVKLISHRECQQPHYYGSEVTTKMLCAADPQWKTDSCQGDSGGPLVCSLQGRMTLTGIVSWGRGCALKDKPGVYTRVSHFLPWIRSHTKEENGLAL

SEQ ID NO: 567 - protein, 253 aa, Artificial Sequence
  UROKINASE-TYPE PLASMINOGEN ACTIVATOR (u-PA) protease domain F30Y/R35T/V38D/Y40H/V41R/D60aE/Y60bQ/L97bA/H99Q/C1 22S/Y149R/M157K/R217K
IIGGEFTTIENQPWYAAIYTRHRGGSDTHRCGGSLISPCWVISATHCFIEQPKKEDYIVYLGRSRLNSNTQGEMKFEVENLILHKDYSADTAAQHNDIALLKIRSKEGRCAQPSRTIQTISLPSMYNDPQFGTSCEITGFGKENSTDRLYPEQLKKTVVKLISHRECQQPHYYGSEVTTKMLCAADPQWKTDSCQGDSGGPLVCSLQGRMTLTGIVSWGKGCALKDKPGVYTRVSHFLPWIRSHTKEENGLAL

SEQ ID NO: 568 - protein, 253 aa, Artificial Sequence
  UROKINASE-TYPE PLASMINOGEN ACTIVATOR (u-PA) protease domain F30Y/R35K/H37E/V38D/Y40H/V41R/D60aP/Y60bD/L97bA/H9 9Q/C122S/Y149N/M157K
IIGGEFTTIENQPWYAAIYKRERGGSDTHRCGGSLISPCWVISATHCFIPDPKKEDYIVYLGRSRLNSNTQGEMKFEVENLILHKDYSADTAAQHNDIALLKIRSKEGRCAQPSRTIQTISLPSMYNDPQFGTSCEITGFGKENSTDNLYPEQLKKTVVKLISHRECQQPHYYGSEVTTKMLCAADPQWKTDSCQGDSGGPLVCSLQGRMTLTGIVSWGRGCALKDKPGVYTRVSHFLPWIRSHTKEENGLAL

SEQ ID NO: 569 - protein, 253 aa, Artificial Sequence
  UROKINASE-TYPE PLASMINOGEN ACTIVATOR (u-PA) protease domain F30Y/R35L/H37D/V38D/Y40H/V41R/Y60bD/L97bA/H99Q/C12 2S/Y149R/M157K
IIGGEFTTIENQPWYAAIYLRDRGGSDTHRCGGSLISPCWVISATHCFIDDPKKEDYIVYLGRSRLNSNTQGEMKFEVENLILHKDYSADTAAQHNDIALLKIRSKEGRCAQPSRTIQTISLPSMYNDPQFGTSCEITGFGKENSTDRLYPEQLKKTVVKLISHRECQQPHYYGSEVTTKMLCAADPQWKTDSCQGDSGGPLVCSLQGRMTLTGIVSWGRGCALKDKPGVYTRVSHFLPWIRSHTKEENGLAL

SEQ ID NO: 570 - protein, 253 aa, Artificial Sequence
  UROKINASE-TYPE PLASMINOGEN ACTIVATOR (u-PA) protease domain F30Y/R35H/H37T/V38D/Y40H/V41R/D60aE/Y60bD/L97bA/H9 9Q/C122S/Y149K/M157K/R217K
IIGGEFTTIENQPWYAAIYHRTRGGSDTHRCGGSLISPCWVISATHCFIEDPKKEDYIVYLGRSRLNSNTQGEMKFEVENLILHKDYSADTAAQHNDIALLKIRSKEGRCAQPSRTIQTISLPSMYNDPQFGTSCEITGFGKENSTDKLYPEQLKKTVVKLISHRECQQPHYYGSEVTTKMLCAADPQWKTDSCQGDSGGPLVCSLQGRMTLTGIVSWGKGCALKDKPGVYTRVSHFLPWIRSHTKEENGLAL

SEQ ID NO: 571 - protein, 253 aa, Artificial Sequence
  UROKINASE-TYPE PLASMINOGEN ACTIVATOR (u-PA) protease domain F30Y/R35S/H37G/V38D/Y40H/V41R/D60aP/Y60bE/L97bA/H9 9Q/C122S/Y149K/M157K
IIGGEFTTIENQPWYAAIYSRGRGGSDTHRCGGSLISPCWVISATHCFIPEPKKEDYIVYLGRSRLNSNTQGEMKFEVENLILHKDYSADTAAQHNDIALLKIRSKEGRCAQPSRTIQTISLPSMYNDPQFGTSCEITGFGKENSTDKLYPEQLKKTVVKLISHRECQQPHYYGSEVTTKMLCAADPQWKTDSCQGDSGGPLVCSLQGRMTLTGIVSWGRGCALKDKPGVYTRVSHFLPWIRSHTKEENGLAL

SEQ ID NO: 572 - protein, 253 aa, Artificial Sequence
  UROKINASE-TYPE PLASMINOGEN ACTIVATOR (u-PA) protease domain F30Y/R35Q/V38D/Y40H/V41R/D60aE/Y60bE/L97bA/H99Q/C1 22S/Y149N/M157K
IIGGEFTTIENQPWYAAIYQRHRGGSDTHRCGGSLISPCWVISATHCFIEEPKKEDYIVYLGRSRLNSNTQGEMKFEVENLILHKDYSADTAAQHNDIALLKIRSKEGRCAQPSRTIQTISLPSMYNDPQFGTSCEITGFGKENSTDNLYPEQLKKTVVKLISHRECQQPHYYGSEVTTKMLCAADPQWKTDSCQGDSGGPLVCSLQGRMTLTGIVSWGRGCALKDKPGVYTRVSHFLPWIRSHTKEENGLAL

SEQ ID NO: 573 - protein, 253 aa, Artificial Sequence
  UROKINASE-TYPE PLASMINOGEN ACTIVATOR (u-PA) protease domain F30Y/R35T/H37A/V38D/Y40H/V41R/D60aP/Y60bE/L97bA/H9 9Q/C122S/Y149K/M157K/R217Y
IIGGEFTTIENQPWYAAIYTRARGGSDTHRCGGSLISPCWVISATHCFIPEPKKEDYIVYLGRSRLNSNTQGEMKFEVENLILHKDYSADTAAQHNDIALLKIRSKEGRCAQPSRTIQTISLPSMYNDPQFGTSCEITGFGKENSTDKLYPEQLKKTVVKLISHRECQQPHYYGSEVTTKMLCAADPQWKTDSCQGDSGGPLVCSLQGRMTLTGIVSWGYGCALKDKPGVYTRVSHFLPWIRSHTKEENGLAL

SEQ ID NO: 574 - protein, 253 aa, Artificial Sequence
  UROKINASE-TYPE PLASMINOGEN ACTIVATOR (u-PA) protease domain F30Y/R35Q/V38D/Y40H/V41R/Y60bS/L97bA/H99Q/C122S/Y1 49R/M157K/R217E
IIGGEFTTIENQPWYAAIYQRHRGGSDTHRCGGSLISPCWVISATHCFIDSPKKEDYIVYLGRSRLNSNTQGEMKFEVENLILHKDYSADTAAQHNDIALLKIRSKEGRCAQPSRTIQTISLPSMYNDPQFGTSCEITGFGKENSTDRLYPEQLKKTVVKLISHRECQQPHYYGSEVTTKMLCAADPQWKTDSCQGDSGGPLVCSLQGRMTLTGIVSWGEGCALKDKPGVYTRVSHFLPWIRSHTKEENGLAL

SEQ ID NO: 575 - protein, 253 aa, Artificial Sequence
  UROKINASE-TYPE PLASMINOGEN ACTIVATOR (u-PA) protease domain F30Y/R37aD/V38D/Y40L/V41R/L97bA/H99Q/C122S/M126K/M 157K
IIGGEFTTIENQPWYAAIYRRHDGGSDTLRCGGSLISPCWVISATHCFIDYPKKEDYIVYLGRSRLNSNTQGEMKFEVENLILHKDYSADTAAQHNDIALLKIRSKEGRCAQPSRTIQTISLPSKYNDPQFGTSCEITGFGKENSTDYLYPEQLKKTVVKLISHRECQQPHYYGSEVTTKMLCAADPQWKTDSCQGDSGGPLVCSLQGRMTLTGIVSWGRGCALKDKPGVYTRVSHFLPWIRSHTKEENGLAL

SEQ ID NO: 576 - protein, 253 aa, Artificial Sequence
  UROKINASE-TYPE PLASMINOGEN ACTIVATOR (u-PA) protease domain F30Y/R35T/H37T/V38D/Y40H/V41R/D60aP/Y60bD/L97bA/H9 9Q/C122S/Y149T/M157K
IIGGEFTTIENQPWYAAIYTRTRGGSDTHRCGGSLISPCWVISATHCFIPDPKKEDYIVYLGRSRLNSNTQGEMKFEVENLILHKDYSADTAAQHNDIALLKIRSKEGRCAQPSRTIQTISLPSMYNDPQFGTSCEITGFGKENSTDTLYPEQLKKTVVKLISHRECQQPHYYGSEVTTKMLCAADPQWKTDSCQGDSGGPLVCSLQGRMTLTGIVSWGRGCALKDKPGVYTRVSHFLPWIRSHTKEENGLAL

SEQ ID NO: 577 - protein, 253 aa, Artificial Sequence
  UROKINASE-TYPE PLASMINOGEN ACTIVATOR (u-PA) protease domain F30Y/R35H/H37D/V38D/Y40H/V41R/D60aK/Y60bS/L97bA/H9 9Q/C122S/Y149R/M157K
IIGGEFTTIENQPWYAAIYHRDRGGSDTHRCGGSLISPCWVISATHCFIKSPKKEDYIVYLGRSRLNSNTQGEMKFEVENLILHKDYSADTAAQHNDIALLKIRSKEGRCAQPSRTIQTISLPSMYNDPQFGTSCEITGFGKENSTDRLYPEQLKKTVVKLISHRECQQPHYYGSEVTTKMLCAADPQWKTDSCQGDSGGPLVCSLQGRMTLTGIVSWGRGCALKDKPGVYTRVSHFLPWIRSHTKEENGLAL

SEQ ID NO: 578 - protein, 253 aa, Artificial Sequence
  UROKINASE-TYPE PLASMINOGEN ACTIVATOR (u-PA) protease domain F30Y/R35S/V38D/Y40H/V41R/D60aE/Y60bS/L97bA/H99Q/C1 22S/Y149R/M157K
IIGGEFTTIENQPWYAAIYSRHRGGSDTHRCGGSLISPCWVISATHCFIESPKKEDYIVYLGRSRLNSNTQGEMKFEVENLILHKDYSADTAAQHNDIALLKIRSKEGRCAQPSRTIQTISLPSMYNDPQFGTSCEITGFGKENSTDRLYPEQLKKTVVKLISHRECQQPHYYGSEVTTKMLCAADPQWKTDSCQGDSGGPLVCSLQGRMTLTGIVSWGRGCALKDKPGVYTRVSHFLPWIRSHTKEENGLAL

SEQ ID NO: 579 - protein, 253 aa, Artificial Sequence
  UROKINASE-TYPE PLASMINOGEN ACTIVATOR (u-PA) protease domain F30Y/R35H/H37T/V38D/Y40H/V41R/D60aR/Y60bD/L97bA/H9 9Q/C122S/Y149R/M157K
IIGGEFTTIENQPWYAAIYHRTRGGSDTHRCGGSLISPCWVISATHCFIRDPKKEDYIVYLGRSRLNSNTQGEMKFEVENLILHKDYSADTAAQHNDIALLKIRSKEGRCAQPSRTIQTISLPSMYNDPQFGTSCEITGFGKENSTDRLYPEQLKKTVVKLISHRECQQPHYYGSEVTTKMLCAADPQWKTDSCQGDSGGPLVCSLQGRMTLTGIVSWGRGCALKDKPGVYTRVSHFLPWIRSHTKEENGLAL

SEQ ID NO: 580 - protein, 253 aa, Artificial Sequence
  UROKINASE-TYPE PLASMINOGEN ACTIVATOR (u-PA) protease domain F30Y/R35Q/V38D/Y40H/V41R/D60aE/Y60bK/L97bA/H99Q/C1 22S/Y149R/M157K/R217I
IIGGEFTTIENQPWYAAIYQRHRGGSDTHRCGGSLISPCWVISATHCFIEKPKKEDYIVYLGRSRLNSNTQGEMKFEVENLILHKDYSADTAAQHNDIALLKIRSKEGRCAQPSRTIQTISLPSMYNDPQFGTSCEITGFGKENSTDRLYPEQLKKTVVKLISHRECQQPHYYGSEVTTKMLCAADPQWKTDSCQGDSGGPLVCSLQGRMTLTGIVSWGIGCALKDKPGVYTRVSHFLPWIRSHTKEENGLAL

SEQ ID NO: 581 - protein, 253 aa, Artificial Sequence
  UROKINASE-TYPE PLASMINOGEN ACTIVATOR (u-PA) protease domain F30Y/R35Q/V38D/Y40H/V41R/D60aP/Y60bE/L97bA/H99Q/C1 22S/Y149R/M157K/R217K
IIGGEFTTIENQPWYAAIYQRHRGGSDTHRCGGSLISPCWVISATHCFIPEPKKEDYIVYLGRSRLNSNTQGEMKFEVENLILHKDYSADTAAQHNDIALLKIRSKEGRCAQPSRTIQTISLPSMYNDPQFGTSCEITGFGKENSTDRLYPEQLKKTVVKLISHRECQQPHYYGSEVTTKMLCAADPQWKTDSCQGDSGGPLVCSLQGRMTLTGIVSWGKGCALKDKPGVYTRVSHFLPWIRSHTKEENGLAL

SEQ ID NO: 582 - protein, 253 aa, Artificial Sequence
  UROKINASE-TYPE PLASMINOGEN ACTIVATOR (u-PA) protease domain F30Y/R35Q/V38D/Y40H/V41R/D60aE/Y60bN/L97bA/H99Q/C1 22S/Y149R/M157K
IIGGEFTTIENQPWYAAIYQRHRGGSDTHRCGGSLISPCWVISATHCFIENPKKEDYIVYLGRSRLNSNTQGEMKFEVENLILHKDYSADTAAQHNDIALLKIRSKEGRCAQPSRTIQTISLPSMYNDPQFGTSCEITGFGKENSTDRLYPEQLKKTVVKLISHRECQQPHYYGSEVTTKMLCAADPQWKTDSCQGDSGGPLVCSLQGRMTLTGIVSWGRGCALKDKPGVYTRVSHFLPWIRSHTKEENGLAL

SEQ ID NO: 583 - protein, 253 aa, Artificial Sequence
  UROKINASE-TYPE PLASMINOGEN ACTIVATOR (u-PA) protease domain F30Y/R35T/H37T/V38D/Y40H/V41R/D60aT/Y60bS/L97bA/H9 9Q/C122S/Y149K/M157K
IIGGEFTTIENQPWYAAIYTRTRGGSDTHRCGGSLISPCWVISATHCFITSPKKEDYIVYLGRSRLNSNTQGEMKFEVENLILHKDYSADTAAQHNDIALLKIRSKEGRCAQPSRTIQTISLPSMYNDPQFGTSCEITGFGKENSTDKLYPEQLKKTVVKLISHRECQQPHYYGSEVTTKMLCAADPQWKTDSCQGDSGGPLVCSLQGRMTLTGIVSWGRGCALKDKPGVYTRVSHFLPWIRSHTKEENGLAL

SEQ ID NO: 584 - protein, 253 aa, Artificial Sequence
  UROKINASE-TYPE PLASMINOGEN ACTIVATOR (u-PA) protease domain F30Y/R36H/V38E/Y40H/V41R/T97aI/L97bA/H99Q/C122S/Y1 49N/L150V/M157K
IIGGEFTTIENQPWYAAIYRHHRGGSETHRCGGSLISPCWVISATHCFIDYPKKEDYIVYLGRSRLNSNTQGEMKFEVENLILHKDYSADIAAQHNDIALLKIRSKEGRCAQPSRTIQTISLPSMYNDPQFGTSCEITGFGKENSTDNVYPEQLKKTVVKLISHRECQQPHYYGSEVTTKMLCAADPQWKTDSCQGDSGGPLVCSLQGRMTLTGIVSWGRGCALKDKPGVYTRVSHFLPWIRSHTKEENGLAL

SEQ ID NO: 585 - protein, 253 aa, Artificial Sequence
  UROKINASE-TYPE PLASMINOGEN ACTIVATOR (u-PA) protease domain F30Y/R36H/V38E/Y40H/V41R/Y60bN/N87D/A96T/T97aI/L97 bA/H99Q/C122S/N145S/M157K/M207K
IIGGEFTTIENQPWYAAIYRHHRGGSETHRCGGSLISPCWVISATHCFIDNPKKEDYIVYLGRSRLNSNTQGEMKFEVEDLILHKDYSTDIAAQHNDIALLKIRSKEGRCAQPSRTIQTISLPSMYNDPQFGTSCEITGFGKESSTDYLYPEQLKKTVVKLISHRECQQPHYYGSEVTTKMLCAADPQWKTDSCQGDSGGPLVCSLQGRKTLTGIVSWGRGCALKDKPGVYTRVSHFLPWIRSHTKEENGLAL

SEQ ID NO: 586 - protein, 253 aa, Artificial Sequence
  UROKINASE-TYPE PLASMINOGEN ACTIVATOR (u-PA) protease domain F30Y/R36H/V38E/Y40H/V41R/T97aI/L97bA/H99Q/C122S/S1 46F/M157K/Q192H/K243Q
IIGGEFTTIENQPWYAAIYRHHRGGSETHRCGGSLISPCWVISATHCFIDYPKKEDYIVYLGRSRLNSNTQGEMKFEVENLILHKDYSADIAAQHNDIALLKIRSKEGRCAQPSRTIQTISLPSMYNDPQFGTSCEITGFGKENFTDYLYPEQLKKTVVKLISHRECQQPHYYGSEVTTKMLCAADPQWKTDSCHGDSGGPLVCSLQGRMTLTGIVSWGRGCALKDKPGVYTRVSHFLPWIRSHTQEENGLAL

SEQ ID NO: 587 - protein, 253 aa, Artificial Sequence
  UROKINASE-TYPE PLASMINOGEN ACTIVATOR (u-PA) protease domain F30Y/R36H/V38E/Y40H/V41R/K61E/T97aI/L97bA/H99Q/C12 2S/Y149H/M157K/K187R
IIGGEFTTIENQPWYAAIYRHHRGGSETHRCGGSLISPCWVISATHCFIDYPEKEDYIVYLGRSRLNSNTQGEMKFEVENLILHKDYSADIAAQHNDIALLKIRSKEGRCAQPSRTIQTISLPSMYNDPQFGTSCEITGFGKENSTDHLYPEQLKKTVVKLISHRECQQPHYYGSEVTTKMLCAADPQWRTDSCQGDSGGPLVCSLQGRMTLTGIVSWGRGCALKDKPGVYTRVSHFLPWIRSHTKEENGLAL

SEQ ID NO: 588 - protein, 253 aa, Artificial Sequence
  UROKINASE-TYPE PLASMINOGEN ACTIVATOR (u-PA) protease domain F30Y/R37aP/V38D/Y40H/V41R/Y60bN/E84D/L97bA/H99Q/C1 22S/M157K/T242I
IIGGEFTTIENQPWYAAIYRRHPGGSDTHRCGGSLISPCWVISATHCFIDNPKKEDYIVYLGRSRLNSNTQGEMKFDVENLILHKDYSADTAAQHNDIALLKIRSKEGRCAQPSRTIQTISLPSMYNDPQFGTSCEITGFGKENSTDYLYPEQLKKTVVKLISHRECQQPHYYGSEVTTKMLCAADPQWKTDSCQGDSGGPLVCSLQGRMTLTGIVSWGRGCALKDKPGVYTRVSHFLPWIRSHIKEENGLAL

SEQ ID NO: 589 - protein, 253 aa, Artificial Sequence
  UROKINASE-TYPE PLASMINOGEN ACTIVATOR (u-PA) protease domain F30Y/R37aP/G37bD/V38D/Y40H/V41R/Y60bN/L97bA/H99Q/C 122S/M157K
IIGGEFTTIENQPWYAAIYRRHPDGSDTHRCGGSLISPCWVISATHCFIDNPKKEDYIVYLGRSRLNSNTQGEMKFEVENLILHKDYSADTAAQHNDIALLKIRSKEGRCAQPSRTIQTISLPSMYNDPQFGTSCEITGFGKENSTDYLYPEQLKKTVVKLISHRECQQPHYYGSEVTTKMLCAADPQWKTDSCQGDSGGPLVCSLQGRMTLTGIVSWGRGCALKDKPGVYTRVSHFLPWIRSHTKEENGLAL

SEQ ID NO: 590 - protein, 253 aa, Artificial Sequence
  UROKINASE-TYPE PLASMINOGEN ACTIVATOR (u-PA) protease domain F30Y/R35L/R36H/H37P/V38E/Y40H/V41R/Y60bG/T97aD/L97 bA/H99Q/C122S/Y149R/M157K
IIGGEFTTIENQPWYAAIYLHPRGGSETHRCGGSLISPCWVISATHCFIDGPKKEDYIVYLGRSRLNSNTQGEMKFEVENLILHKDYSADDAAQHNDIALLKIRSKEGRCAQPSRTIQTISLPSMYNDPQFGTSCEITGFGKENSTDRLYPEQLKKTVVKLISHRECQQPHYYGSEVTTKMLCAADPQWKTDSCQGDSGGPLVCSLQGRMTLTGIVSWGRGCALKDKPGVYTRVSHFLPWIRSHTKEENGLAL

SEQ ID NO: 591 - protein, 253 aa, Artificial Sequence
  UROKINASE-TYPE PLASMINOGEN ACTIVATOR (u-PA) protease domain F30Y/R36H/H37S/V38E/T39L/Y40H/V41R/Y60bH/T97aI/L97 bA/H99Q/C122S/Y149R/M157K
IIGGEFTTIENQPWYAAIYRHSRGGSELHRCGGSLISPCWVISATHCFIDHPKKEDYIVYLGRSRLNSNTQGEMKFEVENLILHKDYSADIAAQHNDIALLKIRSKEGRCAQPSRTIQTISLPSMYNDPQFGTSCEITGFGKENSTDRLYPEQLKKTVVKLISHRECQQPHYYGSEVTTKMLCAADPQWKTDSCQGDSGGPLVCSLQGRMTLTGIVSWGRGCALKDKPGVYTRVSHFLPWIRSHTKEENGLAL

SEQ ID NO: 592 - protein, 253 aa, Artificial Sequence
  UROKINASE-TYPE PLASMINOGEN ACTIVATOR (u-PA) protease domain F30Y/R35L/R36H/H37D/V38E/T39W/Y40H/V41R/Y60bA/T97a D/L97bA/H99Q/C122S/Y149R/M157K
IIGGEFTTIENQPWYAAIYLHDRGGSEWHRCGGSLISPCWVISATHCFIDAPKKEDYIVYLGRSRLNSNTQGEMKFEVENLILHKDYSADDAAQHNDIALLKIRSKEGRCAQPSRTIQTISLPSMYNDPQFGTSCEITGFGKENSTDRLYPEQLKKTVVKLISHRECQQPHYYGSEVTTKMLCAADPQWKTDSCQGDSGGPLVCSLQGRMTLTGIVSWGRGCALKDKPGVYTRVSHFLPWIRSHTKEENGLAL

SEQ ID NO: 593 - protein, 253 aa, Artificial Sequence
  UROKINASE-TYPE PLASMINOGEN ACTIVATOR (u-PA) protease domain F30Y/R36H/H37P/V38E/T39Y/Y40H/V41R/Y60bN/L97bA/H99 Q/C122S/Y149R/M157K
IIGGEFTTIENQPWYAAIYRHPRGGSEYHRCGGSLISPCWVISATHCFIDNPKKEDYIVYLGRSRLNSNTQGEMKFEVENLILHKDYSADTAAQHNDIALLKIRSKEGRCAQPSRTIQTISLPSMYNDPQFGTSCEITGFGKENSTDRLYPEQLKKTVVKLISHRECQQPHYYGSEVTTKMLCAADPQWKTDSCQGDSGGPLVCSLQGRMTLTGIVSWGRGCALKDKPGVYTRVSHFLPWIRSHTKEENGLAL

SEQ ID NO: 594 - protein, 253 aa, Artificial Sequence
  UROKINASE-TYPE PLASMINOGEN ACTIVATOR (u-PA) protease domain F30Y/R36H/H37E/V38E/T39Y/Y40H/V41R/Y60bN/T97aV/L97 bA/H99Q/C122S/Y149K/M157K
IIGGEFTTIENQPWYAAIYRHERGGSEYHRCGGSLISPCWVISATHCFIDNPKKEDYIVYLGRSRLNSNTQGEMKFEVENLILHKDYSADVAAQHNDIALLKIRSKEGRCAQPSRTIQTISLPSMYNDPQFGTSCEITGFGKENSTDKLYPEQLKKTVVKLISHRECQQPHYYGSEVTTKMLCAADPQWKTDSCQGDSGGPLVCSLQGRMTLTGIVSWGRGCALKDKPGVYTRVSHFLPWIRSHTKEENGLAL

SEQ ID NO: 595 - protein, 253 aa, Artificial Sequence
  UROKINASE-TYPE PLASMINOGEN ACTIVATOR (u-PA) protease domain F30Y/R36H/H37G/V38E/T39W/Y40H/V41R/Y60bA/T97aE/L97 bA/H99Q/C122S/Y149Q/M157K
IIGGEFTTIENQPWYAAIYRHGRGGSEWHRCGGSLISPCWVISATHCFIDAPKKEDYIVYLGRSRLNSNTQGEMKFEVENLILHKDYSADEAAQHNDIALLKIRSKEGRCAQPSRTIQTISLPSMYNDPQFGTSCEITGFGKENSTDQLYPEQLKKTVVKLISHRECQQPHYYGSEVTTKMLCAADPQWKTDSCQGDSGGPLVCSLQGRMTLTGIVSWGRGCALKDKPGVYTRVSHFLPWIRSHTKEENGLAL

SEQ ID NO: 596 - protein, 253 aa, Artificial Sequence
  UROKINASE-TYPE PLASMINOGEN ACTIVATOR (u-PA) protease domain F30Y/R36H/H37E/V38E/T39W/Y40H/V41R/Y60bD/T97aD/L97 bA/H99Q/C122S/Y149R/M157K
IIGGEFTTIENQPWYAAIYRHERGGSEWHRCGGSLISPCWVISATHCFIDDPKKEDYIVYLGRSRLNSNTQGEMKFEVENLILHKDYSADDAAQHNDIALLKIRSKEGRCAQPSRTIQTISLPSMYNDPQFGTSCEITGFGKENSTDRLYPEQLKKTVVKLISHRECQQPHYYGSEVTTKMLCAADPQWKTDSCQGDSGGPLVCSLQGRMTLTGIVSWGRGCALKDKPGVYTRVSHFLPWIRSHTKEENGLAL

SEQ ID NO: 597 - protein, 253 aa, Artificial Sequence
  UROKINASE-TYPE PLASMINOGEN ACTIVATOR (u-PA) protease domain F30Y/R36H/H37F/V38E/T39Y/Y40H/V41R/Y60bD/T97aV/L97 bA/H99Q/C122S/Y149L/M157K
IIGGEFTTIENQPWYAAIYRHFRGGSEYHRCGGSLISPCWVISATHCFIDDPKKEDYIVYLGRSRLNSNTQGEMKFEVENLILHKDYSADVAAQHNDIALLKIRSKEGRCAQPSRTIQTISLPSMYNDPQFGTSCEITGFGKENSTDLLYPEQLKKTVVKLISHRECQQPHYYGSEVTTKMLCAADPQWKTDSCQGDSGGPLVCSLQGRMTLTGIVSWGRGCALKDKPGVYTRVSHFLPWIRSHTKEENGLAL

SEQ ID NO: 598 - protein, 253 aa, Artificial Sequence
  UROKINASE-TYPE PLASMINOGEN ACTIVATOR (u-PA) protease domain F30Y/R36H/H37N/V38E/T39Y/Y40H/V41R/Y60bQ/T97aV/L97 bA/H99Q/C122S/Y149L/M157K
IIGGEFTTIENQPWYAAIYRHNRGGSEYHRCGGSLISPCWVISATHCFIDQPKKEDYIVYLGRSRLNSNTQGEMKFEVENLILHKDYSADVAAQHNDIALLKIRSKEGRCAQPSRTIQTISLPSMYNDPQFGTSCEITGFGKENSTDLLYPEQLKKTVVKLISHRECQQPHYYGSEVTTKMLCAADPQWKTDSCQGDSGGPLVCSLQGRMTLTGIVSWGRGCALKDKPGVYTRVSHFLPWIRSHTKEENGLAL

SEQ ID NO: 599 - protein, 253 aa, Artificial Sequence
  UROKINASE-TYPE PLASMINOGEN ACTIVATOR (u-PA) protease domain F30Y/R35L/R36H/H37E/V38E/T39L/Y40H/V41R/Y60bS/T97a D/L97bA/H99Q/C122S/Y149R/M157K
IIGGEFTTIENQPWYAAIYLHERGGSELHRCGGSLISPCWVISATHCFIDSPKKEDYIVYLGRSRLNSNTQGEMKFEVENLILHKDYSADDAAQHNDIALLKIRSKEGRCAQPSRTIQTISLPSMYNDPQFGTSCEITGFGKENSTDRLYPEQLKKTVVKLISHRECQQPHYYGSEVTTKMLCAADPQWKTDSCQGDSGGPLVCSLQGRMTLTGIVSWGRGCALKDKPGVYTRVSHFLPWIRSHTKEENGLAL

SEQ ID NO: 600 - protein, 253 aa, Artificial Sequence
  UROKINASE-TYPE PLASMINOGEN ACTIVATOR (u-PA) protease domain F30Y/R36H/H37D/V38E/T39W/Y40H/V41R/Y60bV/T97aE/L97 bA/H99Q/C122S/Y149R/M157K
IIGGEFTTIENQPWYAAIYRHDRGGSEWHRCGGSLISPCWVISATHCFIDVPKKEDYIVYLGRSRLNSNTQGEMKFEVENLILHKDYSADEAAQHNDIALLKIRSKEGRCAQPSRTIQTISLPSMYNDPQFGTSCEITGFGKENSTDRLYPEQLKKTVVKLISHRECQQPHYYGSEVTTKMLCAADPQWKTDSCQGDSGGPLVCSLQGRMTLTGIVSWGRGCALKDKPGVYTRVSHFLPWIRSHTKEENGLAL

SEQ ID NO: 601 - protein, 253 aa, Artificial Sequence
  UROKINASE-TYPE PLASMINOGEN ACTIVATOR (u-PA) protease domain F30Y/R36H/H37A/V38E/T39Y/Y40H/V41R/Y60bQ/T97aV/L97 bA/H99Q/C122S/Y149R/M157K
IIGGEFTTIENQPWYAAIYRHARGGSEYHRCGGSLISPCWVISATHCFIDQPKKEDYIVYLGRSRLNSNTQGEMKFEVENLILHKDYSADVAAQHNDIALLKIRSKEGRCAQPSRTIQTISLPSMYNDPQFGTSCEITGFGKENSTDRLYPEQLKKTVVKLISHRECQQPHYYGSEVTTKMLCAADPQWKTDSCQGDSGGPLVCSLQGRMTLTGIVSWGRGCALKDKPGVYTRVSHFLPWIRSHTKEENGLAL

SEQ ID NO: 602 - protein, 253 aa, Artificial Sequence
  UROKINASE-TYPE PLASMINOGEN ACTIVATOR (u-PA) protease domain F30Y/R36H/H37D/V38E/T39Y/Y40H/V41R/Y60bM/T97aD/L97 bA/H99Q/C122S/Y149R/M157K
IIGGEFTTIENQPWYAAIYRHDRGGSEYHRCGGSLISPCWVISATHCFIDMPKKEDYIVYLGRSRLNSNTQGEMKFEVENLILHKDYSADDAAQHNDIALLKIRSKEGRCAQPSRTIQTISLPSMYNDPQFGTSCEITGFGKENSTDRLYPEQLKKTVVKLISHRECQQPHYYGSEVTTKMLCAADPQWKTDSCQGDSGGPLVCSLQGRMTLTGIVSWGRGCALKDKPGVYTRVSHFLPWIRSHTKEENGLAL

SEQ ID NO: 603 - protein, 253 aa, Artificial Sequence
  UROKINASE-TYPE PLASMINOGEN ACTIVATOR (u-PA) protease domain F30Y/R36H/H37D/V38E/T39W/Y40H/V41R/Y60bN/T97aV/L97 bA/H99Q/C122S/Y149R/M157K
IIGGEFTTIENQPWYAAIYRHDRGGSEWHRCGGSLISPCWVISATHCFIDNPKKEDYIVYLGRSRLNSNTQGEMKFEVENLILHKDYSADVAAQHNDIALLKIRSKEGRCAQPSRTIQTISLPSMYNDPQFGTSCEITGFGKENSTDRLYPEQLKKTVVKLISHRECQQPHYYGSEVTTKMLCAADPQWKTDSCQGDSGGPLVCSLQGRMTLTGIVSWGRGCALKDKPGVYTRVSHFLPWIRSHTKEENGLAL

SEQ ID NO: 604 - protein, 253 aa, Artificial Sequence
  UROKINASE-TYPE PLASMINOGEN ACTIVATOR (u-PA) protease domain F30Y/R35W/R36H/H37D/V38E/T39Y/Y40H/V41R/Y60bS/T97a L/L97bA/H99Q/C122S/Y149L/M157K
IIGGEFTTIENQPWYAAIYWHDRGGSEYHRCGGSLISPCWVISATHCFIDSPKKEDYIVYLGRSRLNSNTQGEMKFEVENLILHKDYSADLAAQHNDIALLKIRSKEGRCAQPSRTIQTISLPSMYNDPQFGTSCEITGFGKENSTDLLYPEQLKKTVVKLISHRECQQPHYYGSEVTTKMLCAADPQWKTDSCQGDSGGPLVCSLQGRMTLTGIVSWGRGCALKDKPGVYTRVSHFLPWIRSHTKEENGLAL

SEQ ID NO: 605 - protein, 253 aa, Artificial Sequence
  UROKINASE-TYPE PLASMINOGEN ACTIVATOR (u-PA) protease domain F30Y/R36H/V38E/T39V/Y40H/V41R/Y60bH/T97aE/L97bA/H9 9Q/C122S/Y149S/M157K
IIGGEFTTIENQPWYAAIYRHHRGGSEVHRCGGSLISPCWVISATHCFIDHPKKEDYIVYLGRSRLNSNTQGEMKFEVENLILHKDYSADEAAQHNDIALLKIRSKEGRCAQPSRTIQTISLPSMYNDPQFGTSCEITGFGKENSTDSLYPEQLKKTVVKLISHRECQQPHYYGSEVTTKMLCAADPQWKTDSCQGDSGGPLVCSLQGRMTLTGIVSWGRGCALKDKPGVYTRVSHFLPWIRSHTKEENGLAL

SEQ ID NO: 606 - protein, 253 aa, Artificial Sequence
  UROKINASE-TYPE PLASMINOGEN ACTIVATOR (u-PA) protease domain F30Y/R36H/H37E/V38E/T39F/Y40H/V41R/Y60bN/T97aV/L97 bA/H99Q/C122S/Y149R/M157K
IIGGEFTTIENQPWYAAIYRHERGGSEFHRCGGSLISPCWVISATHCFIDNPKKEDYIVYLGRSRLNSNTQGEMKFEVENLILHKDYSADVAAQHNDIALLKIRSKEGRCAQPSRTIQTISLPSMYNDPQFGTSCEITGFGKENSTDRLYPEQLKKTVVKLISHRECQQPHYYGSEVTTKMLCAADPQWKTDSCQGDSGGPLVCSLQGRMTLTGIVSWGRGCALKDKPGVYTRVSHFLPWIRSHTKEENGLAL

SEQ ID NO: 607 - protein, 253 aa, Artificial Sequence
  UROKINASE-TYPE PLASMINOGEN ACTIVATOR (u-PA) protease domain F30Y/R36H/H37G/V38E/T39Y/Y40H/V41R/Y60bN/T97aA/L97 bA/H99Q/C122S/Y149R/M157K
IIGGEFTTIENQPWYAAIYRHGRGGSEYHRCGGSLISPCWVISATHCFIDNPKKEDYIVYLGRSRLNSNTQGEMKFEVENLILHKDYSADAAAQHNDIALLKIRSKEGRCAQPSRTIQTISLPSMYNDPQFGTSCEITGFGKENSTDRLYPEQLKKTVVKLISHRECQQPHYYGSEVTTKMLCAADPQWKTDSCQGDSGGPLVCSLQGRMTLTGIVSWGRGCALKDKPGVYTRVSHFLPWIRSHTKEENGLAL

SEQ ID NO: 608 - protein, 253 aa, Artificial Sequence
  UROKINASE-TYPE PLASMINOGEN ACTIVATOR (u-PA) protease domain F30Y/R35I/R36H/H37E/V38E/T39Y/Y40H/V41R/Y60bS/T97a V/L97bA/H99Q/C122S/Y149L/M157K
IIGGEFTTIENQPWYAAIYIHERGGSEYHRCGGSLISPCWVISATHCFIDSPKKEDYIVYLGRSRLNSNTQGEMKFEVENLILHKDYSADVAAQHNDIALLKIRSKEGRCAQPSRTIQTISLPSMYNDPQFGTSCEITGFGKENSTDLLYPEQLKKTVVKLISHRECQQPHYYGSEVTTKMLCAADPQWKTDSCQGDSGGPLVCSLQGRMTLTGIVSWGRGCALKDKPGVYTRVSHFLPWIRSHTKEENGLAL

SEQ ID NO: 609 - protein, 253 aa, Artificial Sequence
  UROKINASE-TYPE PLASMINOGEN ACTIVATOR (u-PA) protease domain F30Y/R35L/H37D/V38D/Y40H/V41R/D60aE/Y60bT/L97bA/H9 9Q/C122S/Y149R/M157K
IIGGEFTTIENQPWYAAIYLRDRGGSDTHRCGGSLISPCWVISATHCFIETPKKEDYIVYLGRSRLNSNTQGEMKFEVENLILHKDYSADTAAQHNDIALLKIRSKEGRCAQPSRTIQTISLPSMYNDPQFGTSCEITGFGKENSTDRLYPEQLKKTVVKLISHRECQQPHYYGSEVTTKMLCAADPQWKTDSCQGDSGGPLVCSLQGRMTLTGIVSWGRGCALKDKPGVYTRVSHFLPWIRSHTKEENGLAL

SEQ ID NO: 610 - protein, 253 aa, Artificial Sequence
  UROKINASE-TYPE PLASMINOGEN ACTIVATOR (u-PA) protease domain F30Y/R35Q/V38D/Y40H/V41R/D60aK/Y60bV/L97bA/H99Q/C1 22S/Y149R/M157K
IIGGEFTTIENQPWYAAIYQRHRGGSDTHRCGGSLISPCWVISATHCFIKVPKKEDYIVYLGRSRLNSNTQGEMKFEVENLILHKDYSADTAAQHNDIALLKIRSKEGRCAQPSRTIQTISLPSMYNDPQFGTSCEITGFGKENSTDRLYPEQLKKTVVKLISHRECQQPHYYGSEVTTKMLCAADPQWKTDSCQGDSGGPLVCSLQGRMTLTGIVSWGRGCALKDKPGVYTRVSHFLPWIRSHTKEENGLAL

SEQ ID NO: 611 - protein, 253 aa, Artificial Sequence
  UROKINASE-TYPE PLASMINOGEN ACTIVATOR (u-PA) protease domain F30Y/R35W/R36H/H37S/V38E/T39Y/Y40H/V41R/Y60bN/T97a E/L97bA/H99Q/C122S/Y149R/M157K
IIGGEFTTIENQPWYAAIYWHSRGGSEYHRCGGSLISPCWVISATHCFIDNPKKEDYIVYLGRSRLNSNTQGEMKFEVENLILHKDYSADEAAQHNDIALLKIRSKEGRCAQPSRTIQTISLPSMYNDPQFGTSCEITGFGKENSTDRLYPEQLKKTVVKLISHRECQQPHYYGSEVTTKMLCAADPQWKTDSCQGDSGGPLVCSLQGRMTLTGIVSWGRGCALKDKPGVYTRVSHFLPWIRSHTKEENGLAL

SEQ ID NO: 612 - protein, 253 aa, Artificial Sequence
  UROKINASE-TYPE PLASMINOGEN ACTIVATOR (u-PA) protease domain F30Y/R35W/R36H/H37Q/V38E/T39H/Y40H/V41R/T97aE/L97b A/H99Q/C122S/Y149L/M157K
IIGGEFTTIENQPWYAAIYWHQRGGSEHHRCGGSLISPCWVISATHCFIDYPKKEDYIVYLGRSRLNSNTQGEMKFEVENLILHKDYSADEAAQHNDIALLKIRSKEGRCAQPSRTIQTISLPSMYNDPQFGTSCEITGFGKENSTDLLYPEQLKKTVVKLISHRECQQPHYYGSEVTTKMLCAADPQWKTDSCQGDSGGPLVCSLQGRMTLTGIVSWGRGCALKDKPGVYTRVSHFLPWIRSHTKEENGLAL

SEQ ID NO: 613 - protein, 253 aa, Artificial Sequence
  UROKINASE-TYPE PLASMINOGEN ACTIVATOR (u-PA) protease domain F30Y/R35W/R36H/H37D/V38E/T39Y/Y40H/V41R/Y60bD/T97a I/L97bA/H99Q/C122S/M157K
IIGGEFTTIENQPWYAAIYWHDRGGSEYHRCGGSLISPCWVISATHCFIDDPKKEDYIVYLGRSRLNSNTQGEMKFEVENLILHKDYSADIAAQHNDIALLKIRSKEGRCAQPSRTIQTISLPSMYNDPQFGTSCEITGFGKENSTDYLYPEQLKKTVVKLISHRECQQPHYYGSEVTTKMLCAADPQWKTDSCQGDSGGPLVCSLQGRMTLTGIVSWGRGCALKDKPGVYTRVSHFLPWIRSHTKEENGLAL

SEQ ID NO: 614 - protein, 253 aa, Artificial Sequence
  UROKINASE-TYPE PLASMINOGEN ACTIVATOR (u-PA) protease domain F30Y/R35V/R36H/H37G/V38E/T39W/Y40H/V41R/Y60bW/T97a I/L97bA/H99Q/C122S/Y149E/M157K
IIGGEFTTIENQPWYAAIYVHGRGGSEWHRCGGSLISPCWVISATHCFIDWPKKEDYIVYLGRSRLNSNTQGEMKFEVENLILHKDYSADIAAQHNDIALLKIRSKEGRCAQPSRTIQTISLPSMYNDPQFGTSCEITGFGKENSTDELYPEQLKKTVVKLISHRECQQPHYYGSEVTTKMLCAADPQWKTDSCQGDSGGPLVCSLQGRMTLTGIVSWGRGCALKDKPGVYTRVSHFLPWIRSHTKEENGLAL

SEQ ID NO: 615 - protein, 253 aa, Artificial Sequence
  UROKINASE-TYPE PLASMINOGEN ACTIVATOR (u-PA) protease domain F30Y/R35M/R36H/H37G/V38E/T39F/Y40H/V41R/Y60bP/T97a F/L97bA/H99Q/C122S/Y149R/M157K
IIGGEFTTIENQPWYAAIYMHGRGGSEFHRCGGSLISPCWVISATHCFIDPPKKEDYIVYLGRSRLNSNTQGEMKFEVENLILHKDYSADFAAQHNDIALLKIRSKEGRCAQPSRTIQTISLPSMYNDPQFGTSCEITGFGKENSTDRLYPEQLKKTVVKLISHRECQQPHYYGSEVTTKMLCAADPQWKTDSCQGDSGGPLVCSLQGRMTLTGIVSWGRGCALKDKPGVYTRVSHFLPWIRSHTKEENGLAL

SEQ ID NO: 616 - protein, 253 aa, Artificial Sequence
  UROKINASE-TYPE PLASMINOGEN ACTIVATOR (u-PA) protease domain F30Y/R35V/R36H/H37G/V38E/T39W/Y40H/V41R/Y60bA/T97a I/L97bA/H99Q/C122S/Y149R/M157K
IIGGEFTTIENQPWYAAIYVHGRGGSEWHRCGGSLISPCWVISATHCFIDAPKKEDYIVYLGRSRLNSNTQGEMKFEVENLILHKDYSADIAAQHNDIALLKIRSKEGRCAQPSRTIQTISLPSMYNDPQFGTSCEITGFGKENSTDRLYPEQLKKTVVKLISHRECQQPHYYGSEVTTKMLCAADPQWKTDSCQGDSGGPLVCSLQGRMTLTGIVSWGRGCALKDKPGVYTRVSHFLPWIRSHTKEENGLAL

SEQ ID NO: 617 - protein, 253 aa, Artificial Sequence
  UROKINASE-TYPE PLASMINOGEN ACTIVATOR (u-PA) protease domain F30Y/R35V/R36H/H37S/V38E/T39F/Y40H/V41R/Y60bS/T97a M/L97bA/H99Q/C122S/Y149W/M157K
IIGGEFTTIENQPWYAAIYVHSRGGSEFHRCGGSLISPCWVISATHCFIDSPKKEDYIVYLGRSRLNSNTQGEMKFEVENLILHKDYSADMAAQHNDIALLKIRSKEGRCAQPSRTIQTISLPSMYNDPQFGTSCEITGFGKENSTDWLYPEQLKKTVVKLISHRECQQPHYYGSEVTTKMLCAADPQWKTDSCQGDSGGPLVCSLQGRMTLTGIVSWGRGCALKDKPGVYTRVSHFLPWIRSHTKEENGLAL

SEQ ID NO: 618 - protein, 253 aa, Artificial Sequence
  UROKINASE-TYPE PLASMINOGEN ACTIVATOR (u-PA) protease domain F30Y/R35W/R36H/H37D/V38E/T39Y/Y40H/V41R/Y60bT/T97a D/L97bA/H99Q/C122S/Y149R/M157K
IIGGEFTTIENQPWYAAIYWHDRGGSEYHRCGGSLISPCWVISATHCFIDTPKKEDYIVYLGRSRLNSNTQGEMKFEVENLILHKDYSADDAAQHNDIALLKIRSKEGRCAQPSRTIQTISLPSMYNDPQFGTSCEITGFGKENSTDRLYPEQLKKTVVKLISHRECQQPHYYGSEVTTKMLCAADPQWKTDSCQGDSGGPLVCSLQGRMTLTGIVSWGRGCALKDKPGVYTRVSHFLPWIRSHTKEENGLAL

SEQ ID NO: 619 - protein, 253 aa, Artificial Sequence
  UROKINASE-TYPE PLASMINOGEN ACTIVATOR (u-PA) protease domain F30Y/R35L/R36H/H37G/V38E/T39Y/Y40H/V41R/Y60bP/T97a E/L97bA/H99Q/C122S/Y149M/M157K
IIGGEFTTIENQPWYAAIYLHGRGGSEYHRCGGSLISPCWVISATHCFIDPPKKEDYIVYLGRSRLNSNTQGEMKFEVENLILHKDYSADEAAQHNDIALLKIRSKEGRCAQPSRTIQTISLPSMYNDPQFGTSCEITGFGKENSTDMLYPEQLKKTVVKLISHRECQQPHYYGSEVTTKMLCAADPQWKTDSCQGDSGGPLVCSLQGRMTLTGIVSWGRGCALKDKPGVYTRVSHFLPWIRSHTKEENGLAL

SEQ ID NO: 620 - protein, 253 aa, Artificial Sequence
  UROKINASE-TYPE PLASMINOGEN ACTIVATOR (u-PA) protease domain F30Y/R35F/R36H/H37G/V38E/T39Y/Y40H/V41R/Y60bS/T97a D/L97bA/H99Q/C122S/Y149R/M157K
IIGGEFTTIENQPWYAAIYFHGRGGSEYHRCGGSLISPCWVISATHCFIDSPKKEDYIVYLGRSRLNSNTQGEMKFEVENLILHKDYSADDAAQHNDIALLKIRSKEGRCAQPSRTIQTISLPSMYNDPQFGTSCEITGFGKENSTDRLYPEQLKKTVVKLISHRECQQPHYYGSEVTTKMLCAADPQWKTDSCQGDSGGPLVCSLQGRMTLTGIVSWGRGCALKDKPGVYTRVSHFLPWIRSHTKEENGLAL

SEQ ID NO: 621 - protein, 253 aa, Artificial Sequence
  UROKINASE-TYPE PLASMINOGEN ACTIVATOR (u-PA) protease domain F30Y/R35V/R36H/H37S/V38E/T39Y/Y40H/V41R/Y60bP/T97a E/L97bA/H99Q/C122S/Y149E/M157K
IIGGEFTTIENQPWYAAIYVHSRGGSEYHRCGGSLISPCWVISATHCFIDPPKKEDYIVYLGRSRLNSNTQGEMKFEVENLILHKDYSADEAAQHNDIALLKIRSKEGRCAQPSRTIQTISLPSMYNDPQFGTSCEITGFGKENSTDELYPEQLKKTVVKLISHRECQQPHYYGSEVTTKMLCAADPQWKTDSCQGDSGGPLVCSLQGRMTLTGIVSWGRGCALKDKPGVYTRVSHFLPWIRSHTKEENGLAL

SEQ ID NO: 622 - protein, 253 aa, Artificial Sequence
  UROKINASE-TYPE PLASMINOGEN ACTIVATOR (u-PA) protease domain F30Y/R35V/R36H/H37S/V38E/T39F/Y40H/V41R/Y60bS/T97a I/L97bA/H99Q/C122S/Y149R/M157K/Q192T
IIGGEFTTIENQPWYAAIYVHSRGGSEFHRCGGSLISPCWVISATHCFIDSPKKEDYIVYLGRSRLNSNTQGEMKFEVENLILHKDYSADIAAQHNDIALLKIRSKEGRCAQPSRTIQTISLPSMYNDPQFGTSCEITGFGKENSTDRLYPEQLKKTVVKLISHRECQQPHYYGSEVTTKMLCAADPQWKTDSCTGDSGGPLVCSLQGRMTLTGIVSWGRGCALKDKPGVYTRVSHFLPWIRSHTKEENGLAL

SEQ ID NO: 623 - protein, 253 aa, Artificial Sequence
  UROKINASE-TYPE PLASMINOGEN ACTIVATOR (u-PA) protease domain F30Y/R35V/R36H/H37K/V38E/T39F/Y40H/V41R/Y60bN/T97a I/L97bA/H99Q/C122S/Y149R/M157K
IIGGEFTTIENQPWYAAIYVHKRGGSEFHRCGGSLISPCWVISATHCFIDNPKKEDYIVYLGRSRLNSNTQGEMKFEVENLILHKDYSADIAAQHNDIALLKIRSKEGRCAQPSRTIQTISLPSMYNDPQFGTSCEITGFGKENSTDRLYPEQLKKTVVKLISHRECQQPHYYGSEVTTKMLCAADPQWKTDSCQGDSGGPLVCSLQGRMTLTGIVSWGRGCALKDKPGVYTRVSHFLPWIRSHTKEENGLAL

SEQ ID NO: 624 - protein, 253 aa, Artificial Sequence
  UROKINASE-TYPE PLASMINOGEN ACTIVATOR (u-PA) protease domain F30Y/R35V/R36H/H37D/V38E/T39W/Y40H/V41R/Y60bP/T97a I/L97bA/H99Q/C122S/Y149R/M157K
IIGGEFTTIENQPWYAAIYVHDRGGSEWHRCGGSLISPCWVISATHCFIDPPKKEDYIVYLGRSRLNSNTQGEMKFEVENLILHKDYSADIAAQHNDIALLKIRSKEGRCAQPSRTIQTISLPSMYNDPQFGTSCEITGFGKENSTDRLYPEQLKKTVVKLISHRECQQPHYYGSEVTTKMLCAADPQWKTDSCQGDSGGPLVCSLQGRMTLTGIVSWGRGCALKDKPGVYTRVSHFLPWIRSHTKEENGLAL

SEQ ID NO: 625 - protein, 253 aa, Artificial Sequence
  UROKINASE-TYPE PLASMINOGEN ACTIVATOR (u-PA) protease domain F30Y/R35V/R36H/H37G/V38E/T39L/Y40H/V41R/Y60bT/T97a I/L97bA/H99Q/C122S/Y149R/M157K/Q192T/R239H
IIGGEFTTIENQPWYAAIYVHGRGGSELHRCGGSLISPCWVISATHCFIDTPKKEDYIVYLGRSRLNSNTQGEMKFEVENLILHKDYSADIAAQHNDIALLKIRSKEGRCAQPSRTIQTISLPSMYNDPQFGTSCEITGFGKENSTDRLYPEQLKKTVVKLISHRECQQPHYYGSEVTTKMLCAADPQWKTDSCTGDSGGPLVCSLQGRMTLTGIVSWGRGCALKDKPGVYTRVSHFLPWIHSHTKEENGLAL

SEQ ID NO: 626 - protein, 253 aa, Artificial Sequence
  UROKINASE-TYPE PLASMINOGEN ACTIVATOR (u-PA) protease domain F30Y/R35Y/R36H/H37E/V38E/T39L/Y40H/V41W/Y60bE/T97a I/L97bA/H99Q/C122S/Y149R/M157K/Q192F
IIGGEFTTIENQPWYAAIYYHERGGSELHWCGGSLISPCWVISATHCFIDEPKKEDYIVYLGRSRLNSNTQGEMKFEVENLILHKDYSADIAAQHNDIALLKIRSKEGRCAQPSRTIQTISLPSMYNDPQFGTSCEITGFGKENSTDRLYPEQLKKTVVKLISHRECQQPHYYGSEVTTKMLCAADPQWKTDSCFGDSGGPLVCSLQGRMTLTGIVSWGRGCALKDKPGVYTRVSHFLPWIRSHTKEENGLAL

SEQ ID NO: 627 - protein, 253 aa, Artificial Sequence
  UROKINASE-TYPE PLASMINOGEN ACTIVATOR (u-PA) protease domain F30Y/R35W/R36H/H37D/V38E/T39F/Y40H/V41R/Y60bE/T97a I/L97bA/H99Q/C122S/Y149R/M157K
IIGGEFTTIENQPWYAAIYWHDRGGSEFHRCGGSLISPCWVISATHCFIDEPKKEDYIVYLGRSRLNSNTQGEMKFEVENLILHKDYSADIAAQHNDIALLKIRSKEGRCAQPSRTIQTISLPSMYNDPQFGTSCEITGFGKENSTDRLYPEQLKKTVVKLISHRECQQPHYYGSEVTTKMLCAADPQWKTDSCQGDSGGPLVCSLQGRMTLTGIVSWGRGCALKDKPGVYTRVSHFLPWIRSHTKEENGLAL

SEQ ID NO: 628 - protein, 253 aa, Artificial Sequence
  UROKINASE-TYPE PLASMINOGEN ACTIVATOR (u-PA) protease domain F30Y/R35W/R36H/H37D/V38E/T39Y/Y40H/V41R/Y60bA/T97a I/L97bA/H99Q/C122S/Y149R/M157K
IIGGEFTTIENQPWYAAIYWHDRGGSEYHRCGGSLISPCWVISATHCFIDAPKKEDYIVYLGRSRLNSNTQGEMKFEVENLILHKDYSADIAAQHNDIALLKIRSKEGRCAQPSRTIQTISLPSMYNDPQFGTSCEITGFGKENSTDRLYPEQLKKTVVKLISHRECQQPHYYGSEVTTKMLCAADPQWKTDSCQGDSGGPLVCSLQGRMTLTGIVSWGRGCALKDKPGVYTRVSHFLPWIRSHTKEENGLAL

SEQ ID NO: 629 - protein, 253 aa, Artificial Sequence
  UROKINASE-TYPE PLASMINOGEN ACTIVATOR (u-PA) protease domain F30Y/R35W/R36H/H37E/V38E/T39Y/Y40H/V41R/Y60bD/T97a I/L97bA/H99Q/C122S/Y149R/M157K/Q192M
IIGGEFTTIENQPWYAAIYWHERGGSEYHRCGGSLISPCWVISATHCFIDDPKKEDYIVYLGRSRLNSNTQGEMKFEVENLILHKDYSADIAAQHNDIALLKIRSKEGRCAQPSRTIQTISLPSMYNDPQFGTSCEITGFGKENSTDRLYPEQLKKTVVKLISHRECQQPHYYGSEVTTKMLCAADPQWKTDSCMGDSGGPLVCSLQGRMTLTGIVSWGRGCALKDKPGVYTRVSHFLPWIRSHTKEENGLAL

SEQ ID NO: 630 - protein, 253 aa, Artificial Sequence
  UROKINASE-TYPE PLASMINOGEN ACTIVATOR (u-PA) protease domain F30Y/R35W/R36H/H37E/V38E/T39V/Y40H/V41W/Y60bS/T97a I/L97bA/H99Q/C122S/Y149R/M157K/Q192H
IIGGEFTTIENQPWYAAIYWHERGGSEVHWCGGSLISPCWVISATHCFIDSPKKEDYIVYLGRSRLNSNTQGEMKFEVENLILHKDYSADIAAQHNDIALLKIRSKEGRCAQPSRTIQTISLPSMYNDPQFGTSCEITGFGKENSTDRLYPEQLKKTVVKLISHRECQQPHYYGSEVTTKMLCAADPQWKTDSCHGDSGGPLVCSLQGRMTLTGIVSWGRGCALKDKPGVYTRVSHFLPWIRSHTKEENGLAL

SEQ ID NO: 631 - protein, 253 aa, Artificial Sequence
  UROKINASE-TYPE PLASMINOGEN ACTIVATOR (u-PA) protease domain F30Y/R35Y/R36H/H37E/V38E/T39A/Y40H/V41W/Y60bV/T97a I/L97bA/H99Q/C122S/Y149R/M157K/Q192H
IIGGEFTTIENQPWYAAIYYHERGGSEAHWCGGSLISPCWVISATHCFIDVPKKEDYIVYLGRSRLNSNTQGEMKFEVENLILHKDYSADIAAQHNDIALLKIRSKEGRCAQPSRTIQTISLPSMYNDPQFGTSCEITGFGKENSTDRLYPEQLKKTVVKLISHRECQQPHYYGSEVTTKMLCAADPQWKTDSCHGDSGGPLVCSLQGRMTLTGIVSWGRGCALKDKPGVYTRVSHFLPWIRSHTKEENGLAL

SEQ ID NO: 632 - protein, 253 aa, Artificial Sequence
  UROKINASE-TYPE PLASMINOGEN ACTIVATOR (u-PA) protease domain F30Y/R35Y/R36H/H37P/V38E/T39R/Y40H/V41W/Y60bE/T97a I/L97bA/H99Q/C122S/M157K/Q192F
IIGGEFTTIENQPWYAAIYYHPRGGSERHWCGGSLISPCWVISATHCFIDEPKKEDYIVYLGRSRLNSNTQGEMKFEVENLILHKDYSADIAAQHNDIALLKIRSKEGRCAQPSRTIQTISLPSMYNDPQFGTSCEITGFGKENSTDYLYPEQLKKTVVKLISHRECQQPHYYGSEVTTKMLCAADPQWKTDSCFGDSGGPLVCSLQGRMTLTGIVSWGRGCALKDKPGVYTRVSHFLPWIRSHTKEENGLAL

SEQ ID NO: 633 - protein, 253 aa, Artificial Sequence
  UROKINASE-TYPE PLASMINOGEN ACTIVATOR (u-PA) protease domain F30Y/R35Y/R36H/H37D/V38E/T39W/Y40H/V41R/Y60bE/T97a I/L97bA/H99Q/C122S/Y149R/M157K
IIGGEFTTIENQPWYAAIYYHDRGGSEWHRCGGSLISPCWVISATHCFIDEPKKEDYIVYLGRSRLNSNTQGEMKFEVENLILHKDYSADIAAQHNDIALLKIRSKEGRCAQPSRTIQTISLPSMYNDPQFGTSCEITGFGKENSTDRLYPEQLKKTVVKLISHRECQQPHYYGSEVTTKMLCAADPQWKTDSCQGDSGGPLVCSLQGRMTLTGIVSWGRGCALKDKPGVYTRVSHFLPWIRSHTKEENGLAL

SEQ ID NO: 634 - protein, 253 aa, Artificial Sequence
  UROKINASE-TYPE PLASMINOGEN ACTIVATOR (u-PA) protease domain F30Y/R35W/R36H/H37E/V38E/T39V/Y40H/V41W/Y60bA/T97a I/L97bA/H99Q/C122S/Y149R/M157K/Q192A
IIGGEFTTIENQPWYAAIYWHERGGSEVHWCGGSLISPCWVISATHCFIDAPKKEDYIVYLGRSRLNSNTQGEMKFEVENLILHKDYSADIAAQHNDIALLKIRSKEGRCAQPSRTIQTISLPSMYNDPQFGTSCEITGFGKENSTDRLYPEQLKKTVVKLISHRECQQPHYYGSEVTTKMLCAADPQWKTDSCAGDSGGPLVCSLQGRMTLTGIVSWGRGCALKDKPGVYTRVSHFLPWIRSHTKEENGLAL

SEQ ID NO: 635 - protein, 253 aa, Artificial Sequence
  UROKINASE-TYPE PLASMINOGEN ACTIVATOR (u-PA) protease domain R35Q/H37D/V38D/T39H/V41R/Y60bP/L97bA/H99Q/C122S/Y1 49R/Q192T
IIGGEFTTIENQPWFAAIYQRDRGGSDHYRCGGSLISPCWVISATHCFIDPPKKEDYIVYLGRSRLNSNTQGEMKFEVENLILHKDYSADTAAQHNDIALLKIRSKEGRCAQPSRTIQTISLPSMYNDPQFGTSCEITGFGKENSTDRLYPEQLKMTVVKLISHRECQQPHYYGSEVTTKMLCAADPQWKTDSCTGDSGGPLVCSLQGRMTLTGIVSWGRGCALKDKPGVYTRVSHFLPWIRSHTKEENGLAL

SEQ ID NO: 636 - protein, 253 aa, Artificial Sequence
  UROKINASE-TYPE PLASMINOGEN ACTIVATOR (u-PA) protease domain R35F/H37G/V38D/T39H/V41A/Y60bD/L97bA/H99Q/C122S/Y1 49R
IIGGEFTTIENQPWFAAIYFRGRGGSDHYACGGSLISPCWVISATHCFIDDPKKEDYIVYLGRSRLNSNTQGEMKFEVENLILHKDYSADTAAQHNDIALLKIRSKEGRCAQPSRTIQTISLPSMYNDPQFGTSCEITGFGKENSTDRLYPEQLKMTVVKLISHRECQQPHYYGSEVTTKMLCAADPQWKTDSCQGDSGGPLVCSLQGRMTLTGIVSWGRGCALKDKPGVYTRVSHFLPWIRSHTKEENGLAL

SEQ ID NO: 637 - protein, 253 aa, Artificial Sequence
  UROKINASE-TYPE PLASMINOGEN ACTIVATOR (u-PA) protease domain R35E/H37D/V38D/T39N/V41R/Y60bN/L97bA/H99Q/C122S/Y1 49R
IIGGEFTTIENQPWFAAIYERDRGGSDNYRCGGSLISPCWVISATHCFIDNPKKEDYIVYLGRSRLNSNTQGEMKFEVENLILHKDYSADTAAQHNDIALLKIRSKEGRCAQPSRTIQTISLPSMYNDPQFGTSCEITGFGKENSTDRLYPEQLKMTVVKLISHRECQQPHYYGSEVTTKMLCAADPQWKTDSCQGDSGGPLVCSLQGRMTLTGIVSWGRGCALKDKPGVYTRVSHFLPWIRSHTKEENGLAL

SEQ ID NO: 638 - protein, 253 aa, Artificial Sequence
  UROKINASE-TYPE PLASMINOGEN ACTIVATOR (u-PA) protease domain R35Q/H37Y/V38D/T39A/V41R/Y60bP/L97bA/H99Q/C122S/Y1 49R/Q192S
IIGGEFTTIENQPWFAAIYQRYRGGSDAYRCGGSLISPCWVISATHCFIDPPKKEDYIVYLGRSRLNSNTQGEMKFEVENLILHKDYSADTAAQHNDIALLKIRSKEGRCAQPSRTIQTISLPSMYNDPQFGTSCEITGFGKENSTDRLYPEQLKMTVVKLISHRECQQPHYYGSEVTTKMLCAADPQWKTDSCSGDSGGPLVCSLQGRMTLTGIVSWGRGCALKDKPGVYTRVSHFLPWIRSHTKEENGLAL

SEQ ID NO: 639 - protein, 253 aa, Artificial Sequence
  UROKINASE-TYPE PLASMINOGEN ACTIVATOR (u-PA) protease domain R35Q/H37Y/V38D/T39F/V41R/Y60bP/L97bA/H99Q/C122S/Y1 49R/Q192G
IIGGEFTTIENQPWFAAIYQRYRGGSDFYRCGGSLISPCWVISATHCFIDPPKKEDYIVYLGRSRLNSNTQGEMKFEVENLILHKDYSADTAAQHNDIALLKIRSKEGRCAQPSRTIQTISLPSMYNDPQFGTSCEITGFGKENSTDRLYPEQLKMTVVKLISHRECQQPHYYGSEVTTKMLCAADPQWKTDSCGGDSGGPLVCSLQGRMTLTGIVSWGRGCALKDKPGVYTRVSHFLPWIRSHTKEENGLAL

SEQ ID NO: 640 - protein, 253 aa, Artificial Sequence
  UROKINASE-TYPE PLASMINOGEN ACTIVATOR (u-PA) protease domain R35F/H37E/V38D/T39S/V41A/Y60bD/L97bA/H99Q/C122S
IIGGEFTTIENQPWFAAIYFRERGGSDSYACGGSLISPCWVISATHCFIDDPKKEDYIVYLGRSRLNSNTQGEMKFEVENLILHKDYSADTAAQHNDIALLKIRSKEGRCAQPSRTIQTISLPSMYNDPQFGTSCEITGFGKENSTDYLYPEQLKMTVVKLISHRECQQPHYYGSEVTTKMLCAADPQWKTDSCQGDSGGPLVCSLQGRMTLTGIVSWGRGCALKDKPGVYTRVSHFLPWIRSHTKEENGLAL

SEQ ID NO: 641 - protein, 253 aa, Artificial Sequence
  UROKINASE-TYPE PLASMINOGEN ACTIVATOR (u-PA) protease domain R35D/H37R/V38D/T39V/V41T/Y60bT/L97bA/H99Q/C122S/Q1 92A
IIGGEFTTIENQPWFAAIYDRRRGGSDVYTCGGSLISPCWVISATHCFIDTPKKEDYIVYLGRSRLNSNTQGEMKFEVENLILHKDYSADTAAQHNDIALLKIRSKEGRCAQPSRTIQTISLPSMYNDPQFGTSCEITGFGKENSTDYLYPEQLKMTVVKLISHRECQQPHYYGSEVTTKMLCAADPQWKTDSCAGDSGGPLVCSLQGRMTLTGIVSWGRGCALKDKPGVYTRVSHFLPWIRSHTKEENGLAL

SEQ ID NO: 642 - protein, 253 aa, Artificial Sequence
  UROKINASE-TYPE PLASMINOGEN ACTIVATOR (u-PA) protease domain R35Q/H37G/V38D/T39W/V41R/Y60bP/L97bA/H99Q/C122S/Y1 49R/Q192G
IIGGEFTTIENQPWFAAIYQRGRGGSDWYRCGGSLISPCWVISATHCFIDPPKKEDYIVYLGRSRLNSNTQGEMKFEVENLILHKDYSADTAAQHNDIALLKIRSKEGRCAQPSRTIQTISLPSMYNDPQFGTSCEITGFGKENSTDRLYPEQLKMTVVKLISHRECQQPHYYGSEVTTKMLCAADPQWKTDSCGGDSGGPLVCSLQGRMTLTGIVSWGRGCALKDKPGVYTRVSHFLPWIRSHTKEENGLAL

SEQ ID NO: 643 - protein, 253 aa, Artificial Sequence
  UROKINASE-TYPE PLASMINOGEN ACTIVATOR (u-PA) protease domain R35Q/H37M/V38D/T39V/V41R/Y60bP/L97bA/H99Q/C122S/Y1 49R
IIGGEFTTIENQPWFAAIYQRMRGGSDVYRCGGSLISPCWVISATHCFIDPPKKEDYIVYLGRSRLNSNTQGEMKFEVENLILHKDYSADTAAQHNDIALLKIRSKEGRCAQPSRTIQTISLPSMYNDPQFGTSCEITGFGKENSTDRLYPEQLKMTVVKLISHRECQQPHYYGSEVTTKMLCAADPQWKTDSCQGDSGGPLVCSLQGRMTLTGIVSWGRGCALKDKPGVYTRVSHFLPWIRSHTKEENGLAL

SEQ ID NO: 644 - protein, 253 aa, Artificial Sequence
  UROKINASE-TYPE PLASMINOGEN ACTIVATOR (u-PA) protease domain R35L/H37E/V38D/T39Y/V41R/L97bA/H99Q/C122S/Y149R
IIGGEFTTIENQPWFAAIYLRERGGSDYYRCGGSLISPCWVISATHCFIDYPKKEDYIVYLGRSRLNSNTQGEMKFEVENLILHKDYSADTAAQHNDIALLKIRSKEGRCAQPSRTIQTISLPSMYNDPQFGTSCEITGFGKENSTDRLYPEQLKMTVVKLISHRECQQPHYYGSEVTTKMLCAADPQWKTDSCQGDSGGPLVCSLQGRMTLTGIVSWGRGCALKDKPGVYTRVSHFLPWIRSHTKEENGLAL

SEQ ID NO: 645 - protein, 253 aa, Artificial Sequence
  UROKINASE-TYPE PLASMINOGEN ACTIVATOR (u-PA) protease domain R35W/H37D/V38D/T39Y/V41R/Y60bS/L97bA/H99Q/C122S/Y1 49R
IIGGEFTTIENQPWFAAIYWRDRGGSDYYRCGGSLISPCWVISATHCFIDSPKKEDYIVYLGRSRLNSNTQGEMKFEVENLILHKDYSADTAAQHNDIALLKIRSKEGRCAQPSRTIQTISLPSMYNDPQFGTSCEITGFGKENSTDRLYPEQLKMTVVKLISHRECQQPHYYGSEVTTKMLCAADPQWKTDSCQGDSGGPLVCSLQGRMTLTGIVSWGRGCALKDKPGVYTRVSHFLPWIRSHTKEENGLAL

SEQ ID NO: 646 - protein, 253 aa, Artificial Sequence
  UROKINASE-TYPE PLASMINOGEN ACTIVATOR (u-PA) protease domain R35G/H37G/V38D/T39W/V41A/Y60bN/L97bA/H99Q/C122S
IIGGEFTTIENQPWFAAIYGRGRGGSDWYACGGSLISPCWVISATHCFIDNPKKEDYIVYLGRSRLNSNTQGEMKFEVENLILHKDYSADTAAQHNDIALLKIRSKEGRCAQPSRTIQTISLPSMYNDPQFGTSCEITGFGKENSTDYLYPEQLKMTVVKLISHRECQQPHYYGSEVTTKMLCAADPQWKTDSCQGDSGGPLVCSLQGRMTLTGIVSWGRGCALKDKPGVYTRVSHFLPWIRSHTKEENGLAL

SEQ ID NO: 647 - protein, 253 aa, Artificial Sequence
  UROKINASE-TYPE PLASMINOGEN ACTIVATOR (u-PA) protease domain R35Q/H37N/V38D/T39Y/V41R/Y60bP/L97bA/H99Q/C122S
IIGGEFTTIENQPWFAAIYQRNRGGSDYYRCGGSLISPCWVISATHCFIDPPKKEDYIVYLGRSRLNSNTQGEMKFEVENLILHKDYSADTAAQHNDIALLKIRSKEGRCAQPSRTIQTISLPSMYNDPQFGTSCEITGFGKENSTDYLYPEQLKMTVVKLISHRECQQPHYYGSEVTTKMLCAADPQWKTDSCQGDSGGPLVCSLQGRMTLTGIVSWGRGCALKDKPGVYTRVSHFLPWIRSHTKEENGLAL

SEQ ID NO: 648 - protein, 253 aa, Artificial Sequence
  UROKINASE-TYPE PLASMINOGEN ACTIVATOR (u-PA) protease domain R35W/H37D/V38D/T39Y/V41R/Y60bH/L97bA/H99Q/C122S/Y1 49R
IIGGEFTTIENQPWFAAIYWRDRGGSDYYRCGGSLISPCWVISATHCFIDHPKKEDYIVYLGRSRLNSNTQGEMKFEVENLILHKDYSADTAAQHNDIALLKIRSKEGRCAQPSRTIQTISLPSMYNDPQFGTSCEITGFGKENSTDRLYPEQLKMTVVKLISHRECQQPHYYGSEVTTKMLCAADPQWKTDSCQGDSGGPLVCSLQGRMTLTGIVSWGRGCALKDKPGVYTRVSHFLPWIRSHTKEENGLAL

SEQ ID NO: 649 - protein, 253 aa, Artificial Sequence
  UROKINASE-TYPE PLASMINOGEN ACTIVATOR (u-PA) protease domain F30Y/R35Q/R36H/H37G/V38E/T39H/Y40F/V41R/T97aI/L97b A/H99Q/C122S/Y149R/M157K/Q192M
IIGGEFTTIENQPWYAAIYQHGRGGSEHFRCGGSLISPCWVISATHCFIDYPKKEDYIVYLGRSRLNSNTQGEMKFEVENLILHKDYSADIAAQHNDIALLKIRSKEGRCAQPSRTIQTISLPSMYNDPQFGTSCEITGFGKENSTDRLYPEQLKKTVVKLISHRECQQPHYYGSEVTTKMLCAADPQWKTDSCMGDSGGPLVCSLQGRMTLTGIVSWGRGCALKDKPGVYTRVSHFLPWIRSHTKEENGLAL

SEQ ID NO: 650 - protein, 253 aa, Artificial Sequence
  UROKINASE-TYPE PLASMINOGEN ACTIVATOR (u-PA) protease domain R35V/R36H/H37D/V38E/T39W/Y40M/V41R/T97aI/L97bA/H99 Q/C122S/Y149R/M157K
IIGGEFTTIENQPWFAAIYVHDRGGSEWMRCGGSLISPCWVISATHCFIDYPKKEDYIVYLGRSRLNSNTQGEMKFEVENLILHKDYSADIAAQHNDIALLKIRSKEGRCAQPSRTIQTISLPSMYNDPQFGTSCEITGFGKENSTDRLYPEQLKKTVVKLISHRECQQPHYYGSEVTTKMLCAADPQWKTDSCQGDSGGPLVCSLQGRMTLTGIVSWGRGCALKDKPGVYTRVSHFLPWIRSHTKEENGLAL

SEQ ID NO: 651 - protein, 253 aa, Artificial Sequence
  UROKINASE-TYPE PLASMINOGEN ACTIVATOR (u-PA) protease domain F30Y/R35L/R36H/H37D/V38E/T39Y/Y40F/V41R/T97aI/L97b A/H99Q/C122S/Y149R/M157K/Q192N
IIGGEFTTIENQPWYAAIYLHDRGGSEYFRCGGSLISPCWVISATHCFIDYPKKEDYIVYLGRSRLNSNTQGEMKFEVENLILHKDYSADIAAQHNDIALLKIRSKEGRCAQPSRTIQTISLPSMYNDPQFGTSCEITGFGKENSTDRLYPEQLKKTVVKLISHRECQQPHYYGSEVTTKMLCAADPQWKTDSCNGDSGGPLVCSLQGRMTLTGIVSWGRGCALKDKPGVYTRVSHFLPWIRSHTKEENGLAL

SEQ ID NO: 652 - protein, 253 aa, Artificial Sequence
  UROKINASE-TYPE PLASMINOGEN ACTIVATOR (u-PA) protease domain F30Y/R35L/R36H/H37E/V38E/T39L/Y40F/V41R/T97aI/L97b A/H99Q/C122S/Y149R/M157K/Q192H
IIGGEFTTIENQPWYAAIYLHERGGSELFRCGGSLISPCWVISATHCFIDYPKKEDYIVYLGRSRLNSNTQGEMKFEVENLILHKDYSADIAAQHNDIALLKIRSKEGRCAQPSRTIQTISLPSMYNDPQFGTSCEITGFGKENSTDRLYPEQLKKTVVKLISHRECQQPHYYGSEVTTKMLCAADPQWKTDSCHGDSGGPLVCSLQGRMTLTGIVSWGRGCALKDKPGVYTRVSHFLPWIRSHTKEENGLAL

SEQ ID NO: 653 - protein, 253 aa, Artificial Sequence
  UROKINASE-TYPE PLASMINOGEN ACTIVATOR (u-PA) protease domain F30H/R35Q/R36H/H37Y/V38E/T39Y/Y40L/V41R/T97aI/L97b A/H99Q/C122S/Y149R/M157K
IIGGEFTTIENQPWHAAIYQHYRGGSEYLRCGGSLISPCWVISATHCFIDYPKKEDYIVYLGRSRLNSNTQGEMKFEVENLILHKDYSADIAAQHNDIALLKIRSKEGRCAQPSRTIQTISLPSMYNDPQFGTSCEITGFGKENSTDRLYPEQLKKTVVKLISHRECQQPHYYGSEVTTKMLCAADPQWKTDSCQGDSGGPLVCSLQGRMTLTGIVSWGRGCALKDKPGVYTRVSHFLPWIRSHTKEENGLAL

SEQ ID NO: 654 - protein, 253 aa, Artificial Sequence
  UROKINASE-TYPE PLASMINOGEN ACTIVATOR (u-PA) protease domain F30Y/R36H/V38E/Y40H/V41R/T97aI/L97bA/H99Q/C122S/Y1 49R/M157K/Q192Y
IIGGEFTTIENQPWYAAIYRHHRGGSETHRCGGSLISPCWVISATHCFIDYPKKEDYIVYLGRSRLNSNTQGEMKFEVENLILHKDYSADIAAQHNDIALLKIRSKEGRCAQPSRTIQTISLPSMYNDPQFGTSCEITGFGKENSTDRLYPEQLKKTVVKLISHRECQQPHYYGSEVTTKMLCAADPQWKTDSCYGDSGGPLVCSLQGRMTLTGIVSWGRGCALKDKPGVYTRVSHFLPWIRSHTKEENGLAL

SEQ ID NO: 655 - protein, 253 aa, Artificial Sequence
  UROKINASE-TYPE PLASMINOGEN ACTIVATOR (u-PA) protease domain F30L/R35L/R36H/H37D/V38E/T39Y/V41K/T97aI/L97bA/H99 Q/C122S/Y149R/M157K
IIGGEFTTIENQPWLAAIYLHDRGGSEYYKCGGSLISPCWVISATHCFIDYPKKEDYIVYLGRSRLNSNTQGEMKFEVENLILHKDYSADIAAQHNDIALLKIRSKEGRCAQPSRTIQTISLPSMYNDPQFGTSCEITGFGKENSTDRLYPEQLKKTVVKLISHRECQQPHYYGSEVTTKMLCAADPQWKTDSCQGDSGGPLVCSLQGRMTLTGIVSWGRGCALKDKPGVYTRVSHFLPWIRSHTKEENGLAL

SEQ ID NO: 656 - protein, 253 aa, Artificial Sequence
  UROKINASE-TYPE PLASMINOGEN ACTIVATOR (u-PA) protease domain R35Q/R36H/H37Y/V38E/T39Y/Y40L/V41R/T97aI/L97bA/H99 Q/C122S/Y149R/M157K
IIGGEFTTIENQPWFAAIYQHYRGGSEYLRCGGSLISPCWVISATHCFIDYPKKEDYIVYLGRSRLNSNTQGEMKFEVENLILHKDYSADIAAQHNDIALLKIRSKEGRCAQPSRTIQTISLPSMYNDPQFGTSCEITGFGKENSTDRLYPEQLKKTVVKLISHRECQQPHYYGSEVTTKMLCAADPQWKTDSCQGDSGGPLVCSLQGRMTLTGIVSWGRGCALKDKPGVYTRVSHFLPWIRSHTKEENGLAL

SEQ ID NO: 657 - protein, 253 aa, Artificial Sequence
  UROKINASE-TYPE PLASMINOGEN ACTIVATOR (u-PA) protease domain F30Y/R35L/R36H/H37E/V38E/T39N/Y40F/V41R/T97aI/L97b A/H99Q/C122S/Y149R/M157K
IIGGEFTTIENQPWYAAIYLHERGGSENFRCGGSLISPCWVISATHCFIDYPKKEDYIVYLGRSRLNSNTQGEMKFEVENLILHKDYSADIAAQHNDIALLKIRSKEGRCAQPSRTIQTISLPSMYNDPQFGTSCEITGFGKENSTDRLYPEQLKKTVVKLISHRECQQPHYYGSEVTTKMLCAADPQWKTDSCQGDSGGPLVCSLQGRMTLTGIVSWGRGCALKDKPGVYTRVSHFLPWIRSHTKEENGLAL

SEQ ID NO: 658 - protein, 253 aa, Artificial Sequence
  UROKINASE-TYPE PLASMINOGEN ACTIVATOR (u-PA) protease domain F30Y/R35I/R36H/H37D/V38E/T39F/Y40F/V41R/T97aI/L97b A/H99Q/C122S/Y149R/M157K
IIGGEFTTIENQPWYAAIYIHDRGGSEFFRCGGSLISPCWVISATHCFIDYPKKEDYIVYLGRSRLNSNTQGEMKFEVENLILHKDYSADIAAQHNDIALLKIRSKEGRCAQPSRTIQTISLPSMYNDPQFGTSCEITGFGKENSTDRLYPEQLKKTVVKLISHRECQQPHYYGSEVTTKMLCAADPQWKTDSCQGDSGGPLVCSLQGRMTLTGIVSWGRGCALKDKPGVYTRVSHFLPWIRSHTKEENGLAL

SEQ ID NO: 659 - protein, 253 aa, Artificial Sequence
  UROKINASE-TYPE PLASMINOGEN ACTIVATOR (u-PA) protease domain F30Y/R35W/R36H/H37E/V38E/T39S/Y40L/V41R/T97aI/L97b A/H99Q/C122S/Y149R/M157K/Q192A
IIGGEFTTIENQPWYAAIYWHERGGSESLRCGGSLISPCWVISATHCFIDYPKKEDYIVYLGRSRLNSNTQGEMKFEVENLILHKDYSADIAAQHNDIALLKIRSKEGRCAQPSRTIQTISLPSMYNDPQFGTSCEITGFGKENSTDRLYPEQLKKTVVKLISHRECQQPHYYGSEVTTKMLCAADPQWKTDSCAGDSGGPLVCSLQGRMTLTGIVSWGRGCALKDKPGVYTRVSHFLPWIRSHTKEENGLAL

SEQ ID NO: 660 - protein, 253 aa, Artificial Sequence
  UROKINASE-TYPE PLASMINOGEN ACTIVATOR (u-PA) protease domain R35E/R36H/H37D/V38E/T39W/Y40F/V41R/T97aI/L97bA/H99 Q/C122S/Y149R/M157K/Q192T
IIGGEFTTIENQPWFAAIYEHDRGGSEWFRCGGSLISPCWVISATHCFIDYPKKEDYIVYLGRSRLNSNTQGEMKFEVENLILHKDYSADIAAQHNDIALLKIRSKEGRCAQPSRTIQTISLPSMYNDPQFGTSCEITGFGKENSTDRLYPEQLKKTVVKLISHRECQQPHYYGSEVTTKMLCAADPQWKTDSCTGDSGGPLVCSLQGRMTLTGIVSWGRGCALKDKPGVYTRVSHFLPWIRSHTKEENGLAL

SEQ ID NO: 661 - protein, 253 aa, Artificial Sequence
  UROKINASE-TYPE PLASMINOGEN ACTIVATOR (u-PA) protease domain F30H/R35L/R36H/H37E/V38E/T39F/Y40F/V41R/T97aI/L97b A/H99Q/C122S/Y149R/M157K
IIGGEFTTIENQPWHAAIYLHERGGSEFFRCGGSLISPCWVISATHCFIDYPKKEDYIVYLGRSRLNSNTQGEMKFEVENLILHKDYSADIAAQHNDIALLKIRSKEGRCAQPSRTIQTISLPSMYNDPQFGTSCEITGFGKENSTDRLYPEQLKKTVVKLISHRECQQPHYYGSEVTTKMLCAADPQWKTDSCQGDSGGPLVCSLQGRMTLTGIVSWGRGCALKDKPGVYTRVSHFLPWIRSHTKEENGLAL

SEQ ID NO: 662 - protein, 253 aa, Artificial Sequence
  UROKINASE-TYPE PLASMINOGEN ACTIVATOR (u-PA) protease domain F30H/R35L/R36H/H37D/V38E/T39Y/Y40F/V41Q/T97aI/L97b A/H99Q/C122S/Y149R/M157K
IIGGEFTTIENQPWHAAIYLHDRGGSEYFQCGGSLISPCWVISATHCFIDYPKKEDYIVYLGRSRLNSNTQGEMKFEVENLILHKDYSADIAAQHNDIALLKIRSKEGRCAQPSRTIQTISLPSMYNDPQFGTSCEITGFGKENSTDRLYPEQLKKTVVKLISHRECQQPHYYGSEVTTKMLCAADPQWKTDSCQGDSGGPLVCSLQGRMTLTGIVSWGRGCALKDKPGVYTRVSHFLPWIRSHTKEENGLAL

SEQ ID NO: 663 - protein, 253 aa, Artificial Sequence
  UROKINASE-TYPE PLASMINOGEN ACTIVATOR (u-PA) protease domain F30Y/R35W/R36H/H37D/V38E/T39Y/Y40F/V41R/Y60bS/T97a E/L97bA/H99Q/C122S/Y149K/M157K
IIGGEFTTIENQPWYAAIYWHDRGGSEYFRCGGSLISPCWVISATHCFIDSPKKEDYIVYLGRSRLNSNTQGEMKFEVENLILHKDYSADEAAQHNDIALLKIRSKEGRCAQPSRTIQTISLPSMYNDPQFGTSCEITGFGKENSTDKLYPEQLKKTVVKLISHRECQQPHYYGSEVTTKMLCAADPQWKTDSCQGDSGGPLVCSLQGRMTLTGIVSWGRGCALKDKPGVYTRVSHFLPWIRSHTKEENGLAL

SEQ ID NO: 664 - protein, 253 aa, Artificial Sequence
  UROKINASE-TYPE PLASMINOGEN ACTIVATOR (u-PA) protease domain F30Y/R35W/R36H/H37E/S37dP/V38E/T39W/Y40H/V41R/Y60b Q/T97aE/L97bA/H99Q/C122S/Y149K/M157K
IIGGEFTTIENQPWYAAIYWHERGGPEWHRCGGSLISPCWVISATHCFIDQPKKEDYIVYLGRSRLNSNTQGEMKFEVENLILHKDYSADEAAQHNDIALLKIRSKEGRCAQPSRTIQTISLPSMYNDPQFGTSCEITGFGKENSTDKLYPEQLKKTVVKLISHRECQQPHYYGSEVTTKMLCAADPQWKTDSCQGDSGGPLVCSLQGRMTLTGIVSWGRGCALKDKPGVYTRVSHFLPWIRSHTKEENGLAL

SEQ ID NO: 665 - protein, 253 aa, Artificial Sequence
  UROKINASE-TYPE PLASMINOGEN ACTIVATOR (u-PA) protease domain I24T/F30Y/R35W/R36H/H37E/V38E/T39W/Y40H/V41R/Y60bQ /T97aE/L97bA/H99Q/C122S/Y149K/M157K
IIGGEFTTTENQPWYAAIYWHERGGSEWHRCGGSLISPCWVISATHCFIDQPKKEDYIVYLGRSRLNSNTQGEMKFEVENLILHKDYSADEAAQHNDIALLKIRSKEGRCAQPSRTIQTISLPSMYNDPQFGTSCEITGFGKENSTDKLYPEQLKKTVVKLISHRECQQPHYYGSEVTTKMLCAADPQWKTDSCQGDSGGPLVCSLQGRMTLTGIVSWGRGCALKDKPGVYTRVSHFLPWIRSHTKEENGLAL

SEQ ID NO: 666 - protein, 253 aa, Artificial Sequence
  UROKINASE-TYPE PLASMINOGEN ACTIVATOR (u-PA) protease domain I24N/F30Y/R35W/R36H/H37E/V38E/T39W/Y40L/V41R/Y60bQ /N87D/T97aE/L97bA/H99Q/C122S/Y149K/M157K
IIGGEFTTNENQPWYAAIYWHERGGSEWLRCGGSLISPCWVISATHCFIDQPKKEDYIVYLGRSRLNSNTQGEMKFEVEDLILHKDYSADEAAQHNDIALLKIRSKEGRCAQPSRTIQTISLPSMYNDPQFGTSCEITGFGKENSTDKLYPEQLKKTVVKLISHRECQQPHYYGSEVTTKMLCAADPQWKTDSCQGDSGGPLVCSLQGRMTLTGIVSWGRGCALKDKPGVYTRVSHFLPWIRSHTKEENGLAL

SEQ ID NO: 667 - protein, 253 aa, Artificial Sequence
  UROKINASE-TYPE PLASMINOGEN ACTIVATOR (u-PA) protease domain F30Y/R35W/R36H/H37S/V38E/Y40H/Y60bN/T97aE/L97bA/H9 9Q/C122S/Y149R/M157K
IIGGEFTTIENQPWYAAIYWHSRGGSETHVCGGSLISPCWVISATHCFIDNPKKEDYIVYLGRSRLNSNTQGEMKFEVENLILHKDYSADEAAQHNDIALLKIRSKEGRCAQPSRTIQTISLPSMYNDPQFGTSCEITGFGKENSTDRLYPEQLKKTVVKLISHRECQQPHYYGSEVTTKMLCAADPQWKTDSCQGDSGGPLVCSLQGRMTLTGIVSWGRGCALKDKPGVYTRVSHFLPWIRSHTKEENGLAL

SEQ ID NO: 668 - protein, 253 aa, Artificial Sequence
  UROKINASE-TYPE PLASMINOGEN ACTIVATOR (u-PA) protease domain F30Y/R35W/H37Y/V38E/T39Y/Y40H/V41R/Y60bN/T97aE/L97 bA/H99Q/C122S/Y149R
IIGGEFTTIENQPWYAAIYWRYRGGSEYHRCGGSLISPCWVISATHCFIDNPKKEDYIVYLGRSRLNSNTQGEMKFEVENLILHKDYSADEAAQHNDIALLKIRSKEGRCAQPSRTIQTISLPSMYNDPQFGTSCEITGFGKENSTDRLYPEQLKMTVVKLISHRECQQPHYYGSEVTTKMLCAADPQWKTDSCQGDSGGPLVCSLQGRMTLTGIVSWGRGCALKDKPGVYTRVSHFLPWIRSHTKEENGLAL

SEQ ID NO: 669 - protein, 253 aa, Artificial Sequence
  UROKINASE-TYPE PLASMINOGEN ACTIVATOR (u-PA) protease domain F30Y/R35W/H37S/V38E/T39Y/Y40H/V41R/Y60bN/T97aI/L97 bA/H99Q/C122S/Y149R/M157K
IIGGEFTTIENQPWYAAIYWRSRGGSEYHRCGGSLISPCWVISATHCFIDNPKKEDYIVYLGRSRLNSNTQGEMKFEVENLILHKDYSADIAAQHNDIALLKIRSKEGRCAQPSRTIQTISLPSMYNDPQFGTSCEITGFGKENSTDRLYPEQLKKTVVKLISHRECQQPHYYGSEVTTKMLCAADPQWKTDSCQGDSGGPLVCSLQGRMTLTGIVSWGRGCALKDKPGVYTRVSHFLPWIRSHTKEENGLAL

SEQ ID NO: 670 - protein, 253 aa, Artificial Sequence
  UROKINASE-TYPE PLASMINOGEN ACTIVATOR (u-PA) protease domain F30Y/R35W/R36H/H37S/V38E/T39Y/Y40H/V41R/Y60bN/T97a E/L97bA/H99Q/C122S/Y149R
IIGGEFTTIENQPWYAAIYWHSRGGSEYHRCGGSLISPCWVISATHCFIDNPKKEDYIVYLGRSRLNSNTQGEMKFEVENLILHKDYSADEAAQHNDIALLKIRSKEGRCAQPSRTIQTISLPSMYNDPQFGTSCEITGFGKENSTDRLYPEQLKMTVVKLISHRECQQPHYYGSEVTTKMLCAADPQWKTDSCQGDSGGPLVCSLQGRMTLTGIVSWGRGCALKDKPGVYTRVSHFLPWIRSHTKEENGLAL

SEQ ID NO: 671 - protein, 253 aa, Artificial Sequence
  UROKINASE-TYPE PLASMINOGEN ACTIVATOR (u-PA) protease domain R35Y/R36H/H37S/V38D/T39Y/V41R/Y60bN/T97aI/L97bA/H9 9Q/C122S/Y149R
IIGGEFTTIENQPWFAAIYYHSRGGSDYYRCGGSLISPCWVISATHCFIDNPKKEDYIVYLGRSRLNSNTQGEMKFEVENLILHKDYSADIAAQHNDIALLKIRSKEGRCAQPSRTIQTISLPSMYNDPQFGTSCEITGFGKENSTDRLYPEQLKMTVVKLISHRECQQPHYYGSEVTTKMLCAADPQWKTDSCQGDSGGPLVCSLQGRMTLTGIVSWGRGCALKDKPGVYTRVSHFLPWIRSHTKEENGLAL

SEQ ID NO: 672 - protein, 253 aa, Artificial Sequence
  UROKINASE-TYPE PLASMINOGEN ACTIVATOR (u-PA) protease domain R36H/H37S/V38E/T39W/V41R/Y60bN/T97aI/L97bA/H99Q/C1 22S/Y149R
IIGGEFTTIENQPWFAAIYRHSRGGSEWYRCGGSLISPCWVISATHCFIDNPKKEDYIVYLGRSRLNSNTQGEMKFEVENLILHKDYSADIAAQHNDIALLKIRSKEGRCAQPSRTIQTISLPSMYNDPQFGTSCEITGFGKENSTDRLYPEQLKMTVVKLISHRECQQPHYYGSEVTTKMLCAADPQWKTDSCQGDSGGPLVCSLQGRMTLTGIVSWGRGCALKDKPGVYTRVSHFLPWIRSHTKEENGLAL

SEQ ID NO: 673 - protein, 253 aa, Artificial Sequence
  UROKINASE-TYPE PLASMINOGEN ACTIVATOR (u-PA) protease domain R35W/R36H/H37S/V38E/T39Y/V41R/Y60bN/T97aE/L97bA/H9 9Q/C122S/Y149R/M157K
IIGGEFTTIENQPWFAAIYWHSRGGSEYYRCGGSLISPCWVISATHCFIDNPKKEDYIVYLGRSRLNSNTQGEMKFEVENLILHKDYSADEAAQHNDIALLKIRSKEGRCAQPSRTIQTISLPSMYNDPQFGTSCEITGFGKENSTDRLYPEQLKKTVVKLISHRECQQPHYYGSEVTTKMLCAADPQWKTDSCQGDSGGPLVCSLQGRMTLTGIVSWGRGCALKDKPGVYTRVSHFLPWIRSHTKEENGLAL

SEQ ID NO: 674 - protein, 253 aa, Artificial Sequence
  UROKINASE-TYPE PLASMINOGEN ACTIVATOR (u-PA) protease domain F30Y/R35W/R36H/H37S/V38E/Y40H/Y60bN/T97aI/L97bA/H9 9Q/C122S/Y149R
IIGGEFTTIENQPWYAAIYWHSRGGSETHVCGGSLISPCWVISATHCFIDNPKKEDYIVYLGRSRLNSNTQGEMKFEVENLILHKDYSADIAAQHNDIALLKIRSKEGRCAQPSRTIQTISLPSMYNDPQFGTSCEITGFGKENSTDRLYPEQLKMTVVKLISHRECQQPHYYGSEVTTKMLCAADPQWKTDSCQGDSGGPLVCSLQGRMTLTGIVSWGRGCALKDKPGVYTRVSHFLPWIRSHTKEENGLAL

SEQ ID NO: 675 - protein, 253 aa, Artificial Sequence
  UROKINASE-TYPE PLASMINOGEN ACTIVATOR (u-PA) protease domain R35W/R36N/H37S/V38E/T39Y/Y40M/V41R/Y60bN/T97aE/L97 bA/H99Q/C122S/Y149R/M157S
IIGGEFTTIENQPWFAAIYWNSRGGSEYMRCGGSLISPCWVISATHCFIDNPKKEDYIVYLGRSRLNSNTQGEMKFEVENLILHKDYSADEAAQHNDIALLKIRSKEGRCAQPSRTIQTISLPSMYNDPQFGTSCEITGFGKENSTDRLYPEQLKSTVVKLISHRECQQPHYYGSEVTTKMLCAADPQWKTDSCQGDSGGPLVCSLQGRMTLTGIVSWGRGCALKDKPGVYTRVSHFLPWIRSHTKEENGLAL

SEQ ID NO: 676 - protein, 253 aa, Artificial Sequence
  UROKINASE-TYPE PLASMINOGEN ACTIVATOR (u-PA) protease domain R35W/R36Q/H37S/V38T/T39Y/Y40H/V41R/Y60bN/T97aE/L97 bA/H99Q/C122S/Y149R/Y151P/M157R
IIGGEFTTIENQPWFAAIYWQSRGGSTYHRCGGSLISPCWVISATHCFIDNPKKEDYIVYLGRSRLNSNTQGEMKFEVENLILHKDYSADEAAQHNDIALLKIRSKEGRCAQPSRTIQTISLPSMYNDPQFGTSCEITGFGKENSTDRLPPEQLKRTVVKLISHRECQQPHYYGSEVTTKMLCAADPQWKTDSCQGDSGGPLVCSLQGRMTLTGIVSWGRGCALKDKPGVYTRVSHFLPWIRSHTKEENGLAL

SEQ ID NO: 677 - protein, 253 aa, Artificial Sequence
  UROKINASE-TYPE PLASMINOGEN ACTIVATOR (u-PA) protease domain F30Y/R35W/R36Q/H37S/V38P/T39Y/Y40L/V41R/Y60bN/T97a E/L97bA/H99Q/C122S/Y149R/M157R
IIGGEFTTIENQPWYAAIYWQSRGGSPYLRCGGSLISPCWVISATHCFIDNPKKEDYIVYLGRSRLNSNTQGEMKFEVENLILHKDYSADEAAQHNDIALLKIRSKEGRCAQPSRTIQTISLPSMYNDPQFGTSCEITGFGKENSTDRLYPEQLKRTVVKLISHRECQQPHYYGSEVTTKMLCAADPQWKTDSCQGDSGGPLVCSLQGRMTLTGIVSWGRGCALKDKPGVYTRVSHFLPWIRSHTKEENGLAL

SEQ ID NO: 678 - protein, 253 aa, Artificial Sequence
  UROKINASE-TYPE PLASMINOGEN ACTIVATOR (u-PA) protease domain R35W/R36Q/H37S/V38P/T39Y/V41R/Y60bN/T97aE/L97bA/H9 9Q/C122S/Y149R/Y151L
IIGGEFTTIENQPWFAAIYWQSRGGSPYYRCGGSLISPCWVISATHCFIDNPKKEDYIVYLGRSRLNSNTQGEMKFEVENLILHKDYSADEAAQHNDIALLKIRSKEGRCAQPSRTIQTISLPSMYNDPQFGTSCEITGFGKENSTDRLLPEQLKMTVVKLISHRECQQPHYYGSEVTTKMLCAADPQWKTDSCQGDSGGPLVCSLQGRMTLTGIVSWGRGCALKDKPGVYTRVSHFLPWIRSHTKEENGLAL

SEQ ID NO: 679 - protein, 253 aa, Artificial Sequence
  UROKINASE-TYPE PLASMINOGEN ACTIVATOR (u-PA) protease domain F30H/R35W/R36T/H37S/V38P/T39Y/V41R/Y60bN/T97aE/L97 bA/H99Q/C122S/Y149R/Y151L/M157S
IIGGEFTTIENQPWHAAIYWTSRGGSPYYRCGGSLISPCWVISATHCFIDNPKKEDYIVYLGRSRLNSNTQGEMKFEVENLILHKDYSADEAAQHNDIALLKIRSKEGRCAQPSRTIQTISLPSMYNDPQFGTSCEITGFGKENSTDRLLPEQLKSTVVKLISHRECQQPHYYGSEVTTKMLCAADPQWKTDSCQGDSGGPLVCSLQGRMTLTGIVSWGRGCALKDKPGVYTRVSHFLPWIRSHTKEENGLAL

SEQ ID NO: 680 - protein, 253 aa, Artificial Sequence
  UROKINASE-TYPE PLASMINOGEN ACTIVATOR (u-PA) protease domain F30Y/R35W/R36Q/H37S/V38E/T39Y/Y40L/V41R/Y60bN/T97a E/L97bA/H99Q/C122S/Y149R/Y151L/M157T/Q192H
IIGGEFTTIENQPWYAAIYWQSRGGSEYLRCGGSLISPCWVISATHCFIDNPKKEDYIVYLGRSRLNSNTQGEMKFEVENLILHKDYSADEAAQHNDIALLKIRSKEGRCAQPSRTIQTISLPSMYNDPQFGTSCEITGFGKENSTDRLLPEQLKTTVVKLISHRECQQPHYYGSEVTTKMLCAADPQWKTDSCHGDSGGPLVCSLQGRMTLTGIVSWGRGCALKDKPGVYTRVSHFLPWIRSHTKEENGLAL

SEQ ID NO: 681 - protein, 253 aa, Artificial Sequence
  UROKINASE-TYPE PLASMINOGEN ACTIVATOR (u-PA) protease domain F30Y/R35W/R36K/H37S/V38D/T39Y/Y40L/V41R/Y60bN/T97a E/L97bA/H99Q/C122S/Y149R/Y151L/M157R/Q192T
IIGGEFTTIENQPWYAAIYWKSRGGSDYLRCGGSLISPCWVISATHCFIDNPKKEDYIVYLGRSRLNSNTQGEMKFEVENLILHKDYSADEAAQHNDIALLKIRSKEGRCAQPSRTIQTISLPSMYNDPQFGTSCEITGFGKENSTDRLLPEQLKRTVVKLISHRECQQPHYYGSEVTTKMLCAADPQWKTDSCTGDSGGPLVCSLQGRMTLTGIVSWGRGCALKDKPGVYTRVSHFLPWIRSHTKEENGLAL

SEQ ID NO: 682 - protein, 253 aa, Artificial Sequence
  UROKINASE-TYPE PLASMINOGEN ACTIVATOR (u-PA) protease domain R35W/R36K/H37S/V38E/T39Y/Y40L/V41R/Y60bN/T97aE/L97 bA/H99Q/C122S/Y149R/Y151L/M157S/Q192H
IIGGEFTTIENQPWFAAIYWKSRGGSEYLRCGGSLISPCWVISATHCFIDNPKKEDYIVYLGRSRLNSNTQGEMKFEVENLILHKDYSADEAAQHNDIALLKIRSKEGRCAQPSRTIQTISLPSMYNDPQFGTSCEITGFGKENSTDRLLPEQLKSTVVKLISHRECQQPHYYGSEVTTKMLCAADPQWKTDSCHGDSGGPLVCSLQGRMTLTGIVSWGRGCALKDKPGVYTRVSHFLPWIRSHTKEENGLAL

SEQ ID NO: 683 - protein, 253 aa, Artificial Sequence
  UROKINASE-TYPE PLASMINOGEN ACTIVATOR (u-PA) protease domain F30Y/R35W/R36S/H37S/V38Q/T39Y/Y40L/V41R/Y60bN/T97a E/L97bA/H99Q/C122S/Y149R/Y151L/M157S/Q192N
IIGGEFTTIENQPWYAAIYWSSRGGSQYLRCGGSLISPCWVISATHCFIDNPKKEDYIVYLGRSRLNSNTQGEMKFEVENLILHKDYSADEAAQHNDIALLKIRSKEGRCAQPSRTIQTISLPSMYNDPQFGTSCEITGFGKENSTDRLLPEQLKSTVVKLISHRECQQPHYYGSEVTTKMLCAADPQWKTDSCNGDSGGPLVCSLQGRMTLTGIVSWGRGCALKDKPGVYTRVSHFLPWIRSHTKEENGLAL

SEQ ID NO: 684 - protein, 253 aa, Artificial Sequence
  UROKINASE-TYPE PLASMINOGEN ACTIVATOR (u-PA) protease domain F30Y/R35W/R36Q/H37S/V38T/T39Y/Y40L/V41R/Y60bN/T97a E/L97bA/H99Q/C122S/Y149R/Y151L/M157K/Q192T
IIGGEFTTIENQPWYAAIYWQSRGGSTYLRCGGSLISPCWVISATHCFIDNPKKEDYIVYLGRSRLNSNTQGEMKFEVENLILHKDYSADEAAQHNDIALLKIRSKEGRCAQPSRTIQTISLPSMYNDPQFGTSCEITGFGKENSTDRLLPEQLKKTVVKLISHRECQQPHYYGSEVTTKMLCAADPQWKTDSCTGDSGGPLVCSLQGRMTLTGIVSWGRGCALKDKPGVYTRVSHFLPWIRSHTKEENGLAL

SEQ ID NO: 685 - protein, 253 aa, Artificial Sequence
  UROKINASE-TYPE PLASMINOGEN ACTIVATOR (u-PA) protease domain R35W/R36K/H37S/V38A/T39Y/V41R/Y60bN/T97aE/L97bA/H9 9Q/C122S/Y149R/Y151L/M157R/Q192T
IIGGEFTTIENQPWFAAIYWKSRGGSAYYRCGGSLISPCWVISATHCFIDNPKKEDYIVYLGRSRLNSNTQGEMKFEVENLILHKDYSADEAAQHNDIALLKIRSKEGRCAQPSRTIQTISLPSMYNDPQFGTSCEITGFGKENSTDRLLPEQLKRTVVKLISHRECQQPHYYGSEVTTKMLCAADPQWKTDSCTGDSGGPLVCSLQGRMTLTGIVSWGRGCALKDKPGVYTRVSHFLPWIRSHTKEENGLAL

SEQ ID NO: 686 - protein, 253 aa, Artificial Sequence
  UROKINASE-TYPE PLASMINOGEN ACTIVATOR (u-PA) protease domain F30Y/R35W/R36H/H37S/V38E/T39Y/Y40H/V41R/Y60bN/T97a E/L97bA/H99Q/C122S/Y149R/Y151P/M157K/Q192H
IIGGEFTTIENQPWYAAIYWHSRGGSEYHRCGGSLISPCWVISATHCFIDNPKKEDYIVYLGRSRLNSNTQGEMKFEVENLILHKDYSADEAAQHNDIALLKIRSKEGRCAQPSRTIQTISLPSMYNDPQFGTSCEITGFGKENSTDRLPPEQLKKTVVKLISHRECQQPHYYGSEVTTKMLCAADPQWKTDSCHGDSGGPLVCSLQGRMTLTGIVSWGRGCALKDKPGVYTRVSHFLPWIRSHTKEENGLAL

SEQ ID NO: 687 - protein, 253 aa, Artificial Sequence
  UROKINASE-TYPE PLASMINOGEN ACTIVATOR (u-PA) protease domain R35W/R36Q/H37S/V38E/T39Y/Y40L/V41R/Y60bN/T97aE/L97 bA/H99Q/C122S/Y149R/Y151L/M157S/Q192T
IIGGEFTTIENQPWFAAIYWQSRGGSEYLRCGGSLISPCWVISATHCFIDNPKKEDYIVYLGRSRLNSNTQGEMKFEVENLILHKDYSADEAAQHNDIALLKIRSKEGRCAQPSRTIQTISLPSMYNDPQFGTSCEITGFGKENSTDRLLPEQLKSTVVKLISHRECQQPHYYGSEVTTKMLCAADPQWKTDSCTGDSGGPLVCSLQGRMTLTGIVSWGRGCALKDKPGVYTRVSHFLPWIRSHTKEENGLAL

SEQ ID NO: 688 - protein, 253 aa, Artificial Sequence
  UROKINASE-TYPE PLASMINOGEN ACTIVATOR (u-PA) protease domain R35W/R36Q/H37S/V38S/T39Y/V41R/Y60bN/T97aE/L97bA/H9 9Q/C122S/Y149R/Y151L/M157S/Q192H
IIGGEFTTIENQPWFAAIYWQSRGGSSYYRCGGSLISPCWVISATHCFIDNPKKEDYIVYLGRSRLNSNTQGEMKFEVENLILHKDYSADEAAQHNDIALLKIRSKEGRCAQPSRTIQTISLPSMYNDPQFGTSCEITGFGKENSTDRLLPEQLKSTVVKLISHRECQQPHYYGSEVTTKMLCAADPQWKTDSCHGDSGGPLVCSLQGRMTLTGIVSWGRGCALKDKPGVYTRVSHFLPWIRSHTKEENGLAL

SEQ ID NO: 689 - protein, 253 aa, Artificial Sequence
  UROKINASE-TYPE PLASMINOGEN ACTIVATOR (u-PA) protease domain F30H/R35W/R36H/H37S/V38E/T39Y/Y40M/V41R/Y60bN/T97a E/L97bA/H99Q/C122S/Y149R/M157K
IIGGEFTTIENQPWHAAIYWHSRGGSEYMRCGGSLISPCWVISATHCFIDNPKKEDYIVYLGRSRLNSNTQGEMKFEVENLILHKDYSADEAAQHNDIALLKIRSKEGRCAQPSRTIQTISLPSMYNDPQFGTSCEITGFGKENSTDRLYPEQLKKTVVKLISHRECQQPHYYGSEVTTKMLCAADPQWKTDSCQGDSGGPLVCSLQGRMTLTGIVSWGRGCALKDKPGVYTRVSHFLPWIRSHTKEENGLAL

SEQ ID NO: 690 - protein, 253 aa, Artificial Sequence
  UROKINASE-TYPE PLASMINOGEN ACTIVATOR (u-PA) protease domain F30Y/R35W/R36T/H37S/V38S/T39Y/Y40L/V41R/Y60bN/T97a E/L97bA/H99Q/C122S/Y149R/Y151L/M157R/Q192Y
IIGGEFTTIENQPWYAAIYWTSRGGSSYLRCGGSLISPCWVISATHCFIDNPKKEDYIVYLGRSRLNSNTQGEMKFEVENLILHKDYSADEAAQHNDIALLKIRSKEGRCAQPSRTIQTISLPSMYNDPQFGTSCEITGFGKENSTDRLLPEQLKRTVVKLISHRECQQPHYYGSEVTTKMLCAADPQWKTDSCYGDSGGPLVCSLQGRMTLTGIVSWGRGCALKDKPGVYTRVSHFLPWIRSHTKEENGLAL

SEQ ID NO: 691 - protein, 253 aa, Artificial Sequence
  UROKINASE-TYPE PLASMINOGEN ACTIVATOR (u-PA) protease domain F30Y/R35L/R36H/H37E/V38E/T39S/Y40F/V41R/T97aI/L97b A/H99Q/C122S/Y149R/M157K
IIGGEFTTIENQPWYAAIYLHERGGSESFRCGGSLISPCWVISATHCFIDYPKKEDYIVYLGRSRLNSNTQGEMKFEVENLILHKDYSADIAAQHNDIALLKIRSKEGRCAQPSRTIQTISLPSMYNDPQFGTSCEITGFGKENSTDRLYPEQLKKTVVKLISHRECQQPHYYGSEVTTKMLCAADPQWKTDSCQGDSGGPLVCSLQGRMTLTGIVSWGRGCALKDKPGVYTRVSHFLPWIRSHTKEENGLAL

SEQ ID NO: 692 - protein, 253 aa, Artificial Sequence
  UROKINASE-TYPE PLASMINOGEN ACTIVATOR (u-PA) protease domain F30Y/R35V/R36H/H37T/V38E/T39A/Y40L/V41Q/T97aI/L97b A/H99Q/C122S/Y149R/M157K
IIGGEFTTIENQPWYAAIYVHTRGGSEALQCGGSLISPCWVISATHCFIDYPKKEDYIVYLGRSRLNSNTQGEMKFEVENLILHKDYSADIAAQHNDIALLKIRSKEGRCAQPSRTIQTISLPSMYNDPQFGTSCEITGFGKENSTDRLYPEQLKKTVVKLISHRECQQPHYYGSEVTTKMLCAADPQWKTDSCQGDSGGPLVCSLQGRMTLTGIVSWGRGCALKDKPGVYTRVSHFLPWIRSHTKEENGLAL

SEQ ID NO: 693 - protein, 253 aa, Artificial Sequence
  UROKINASE-TYPE PLASMINOGEN ACTIVATOR (u-PA) protease domain F30Y/R35K/R36H/H37E/R37aK/V38E/T39F/Y40F/V41R/D60a P/Y60bS/T97aI/L97bA/H99Q/C122S/Y149R/M157K
IIGGEFTTIENQPWYAAIYKHEKGGSEFFRCGGSLISPCWVISATHCFIPSPKKEDYIVYLGRSRLNSNTQGEMKFEVENLILHKDYSADIAAQHNDIALLKIRSKEGRCAQPSRTIQTISLPSMYNDPQFGTSCEITGFGKENSTDRLYPEQLKKTVVKLISHRECQQPHYYGSEVTTKMLCAADPQWKTDSCQGDSGGPLVCSLQGRMTLTGIVSWGRGCALKDKPGVYTRVSHFLPWIRSHTKEENGLAL

SEQ ID NO: 694 - protein, 253 aa, Artificial Sequence
  UROKINASE-TYPE PLASMINOGEN ACTIVATOR (u-PA) protease domain F30Y/R35Q/R36H/H37G/R37aE/V38E/T39Y/Y40F/V41R/D60a P/Y60bG/T97aI/L97bA/H99Q/C122S/Y149R/M157K
IIGGEFTTIENQPWYAAIYQHGEGGSEYFRCGGSLISPCWVISATHCFIPGPKKEDYIVYLGRSRLNSNTQGEMKFEVENLILHKDYSADIAAQHNDIALLKIRSKEGRCAQPSRTIQTISLPSMYNDPQFGTSCEITGFGKENSTDRLYPEQLKKTVVKLISHRECQQPHYYGSEVTTKMLCAADPQWKTDSCQGDSGGPLVCSLQGRMTLTGIVSWGRGCALKDKPGVYTRVSHFLPWIRSHTKEENGLAL

SEQ ID NO: 695 - protein, 253 aa, Artificial Sequence
  UROKINASE-TYPE PLASMINOGEN ACTIVATOR (u-PA) protease domain F30Y/R35Q/R36H/H37G/R37aE/V38E/T39I/Y40F/V41R/D60a P/Y60bD/T97aI/L97bA/H99Q/C122S/Y149M/M157K
IIGGEFTTIENQPWYAAIYQHGEGGSEIFRCGGSLISPCWVISATHCFIPDPKKEDYIVYLGRSRLNSNTQGEMKFEVENLILHKDYSADIAAQHNDIALLKIRSKEGRCAQPSRTIQTISLPSMYNDPQFGTSCEITGFGKENSTDMLYPEQLKKTVVKLISHRECQQPHYYGSEVTTKMLCAADPQWKTDSCQGDSGGPLVCSLQGRMTLTGIVSWGRGCALKDKPGVYTRVSHFLPWIRSHTKEENGLAL

SEQ ID NO: 696 - protein, 253 aa, Artificial Sequence
  UROKINASE-TYPE PLASMINOGEN ACTIVATOR (u-PA) protease domain F30Y/R35H/R36H/H37D/R37aE/V38E/T39Y/Y40F/V41R/D60a P/Y60bD/T97aI/L97bA/H99Q/C122S/Y149R/M157K
IIGGEFTTIENQPWYAAIYHHDEGGSEYFRCGGSLISPCWVISATHCFIPDPKKEDYIVYLGRSRLNSNTQGEMKFEVENLILHKDYSADIAAQHNDIALLKIRSKEGRCAQPSRTIQTISLPSMYNDPQFGTSCEITGFGKENSTDRLYPEQLKKTVVKLISHRECQQPHYYGSEVTTKMLCAADPQWKTDSCQGDSGGPLVCSLQGRMTLTGIVSWGRGCALKDKPGVYTRVSHFLPWIRSHTKEENGLAL

SEQ ID NO: 697 - protein, 253 aa, Artificial Sequence
  UROKINASE-TYPE PLASMINOGEN ACTIVATOR (u-PA) protease domain H37M/R37aD/V38E/T39A/V41R/D60aP/Y60bS/T97aI/L97bA/ H99Q/C122S/Y149R
IIGGEFTTIENQPWFAAIYRRMDGGSEAYRCGGSLISPCWVISATHCFIPSPKKEDYIVYLGRSRLNSNTQGEMKFEVENLILHKDYSADIAAQHNDIALLKIRSKEGRCAQPSRTIQTISLPSMYNDPQFGTSCEITGFGKENSTDRLYPEQLKMTVVKLISHRECQQPHYYGSEVTTKMLCAADPQWKTDSCQGDSGGPLVCSLQGRMTLTGIVSWGRGCALKDKPGVYTRVSHFLPWIRSHTKEENGLAL

SEQ ID NO: 698 - protein, 253 aa, Artificial Sequence
  UROKINASE-TYPE PLASMINOGEN ACTIVATOR (u-PA) protease domain R35F/H37D/R37aS/V38E/T39Y/V41R/D60aE/Y60bD/T97aI/L 97bA/H99Q/C122S/Y149R
IIGGEFTTIENQPWFAAIYFRDSGGSEYYRCGGSLISPCWVISATHCFIEDPKKEDYIVYLGRSRLNSNTQGEMKFEVENLILHKDYSADIAAQHNDIALLKIRSKEGRCAQPSRTIQTISLPSMYNDPQFGTSCEITGFGKENSTDRLYPEQLKMTVVKLISHRECQQPHYYGSEVTTKMLCAADPQWKTDSCQGDSGGPLVCSLQGRMTLTGIVSWGRGCALKDKPGVYTRVSHFLPWIRSHTKEENGLAL

SEQ ID NO: 699 - protein, 253 aa, Artificial Sequence
  UROKINASE-TYPE PLASMINOGEN ACTIVATOR (u-PA) protease domain R35A/H37D/R37aN/V38E/T39F/V41R/D60aP/Y60bD/T97aI/L 97bA/H99Q/C122S/Y149R
IIGGEFTTIENQPWFAAIYARDNGGSEFYRCGGSLISPCWVISATHCFIPDPKKEDYIVYLGRSRLNSNTQGEMKFEVENLILHKDYSADIAAQHNDIALLKIRSKEGRCAQPSRTIQTISLPSMYNDPQFGTSCEITGFGKENSTDRLYPEQLKMTVVKLISHRECQQPHYYGSEVTTKMLCAADPQWKTDSCQGDSGGPLVCSLQGRMTLTGIVSWGRGCALKDKPGVYTRVSHFLPWIRSHTKEENGLAL

SEQ ID NO: 700 - protein, 253 aa, Artificial Sequence
  UROKINASE-TYPE PLASMINOGEN ACTIVATOR (u-PA) protease domain R35Q/H37D/R37aA/V38E/T39F/V41R/D60aP/Y60bE/T97aI/L 97bA/H99Q/C122S/Y149R
IIGGEFTTIENQPWFAAIYQRDAGGSEFYRCGGSLISPCWVISATHCFIPEPKKEDYIVYLGRSRLNSNTQGEMKFEVENLILHKDYSADIAAQHNDIALLKIRSKEGRCAQPSRTIQTISLPSMYNDPQFGTSCEITGFGKENSTDRLYPEQLKMTVVKLISHRECQQPHYYGSEVTTKMLCAADPQWKTDSCQGDSGGPLVCSLQGRMTLTGIVSWGRGCALKDKPGVYTRVSHFLPWIRSHTKEENGLAL

SEQ ID NO: 701 - protein, 253 aa, Artificial Sequence
  UROKINASE-TYPE PLASMINOGEN ACTIVATOR (u-PA) protease domain R35W/H37D/R37aP/V38E/T39W/V41R/D60aR/Y60bS/T97aI/L 97bA/H99Q/C122S/Y149R
IIGGEFTTIENQPWFAAIYWRDPGGSEWYRCGGSLISPCWVISATHCFIRSPKKEDYIVYLGRSRLNSNTQGEMKFEVENLILHKDYSADIAAQHNDIALLKIRSKEGRCAQPSRTIQTISLPSMYNDPQFGTSCEITGFGKENSTDRLYPEQLKMTVVKLISHRECQQPHYYGSEVTTKMLCAADPQWKTDSCQGDSGGPLVCSLQGRMTLTGIVSWGRGCALKDKPGVYTRVSHFLPWIRSHTKEENGLAL

SEQ ID NO: 702 - protein, 253 aa, Artificial Sequence
  UROKINASE-TYPE PLASMINOGEN ACTIVATOR (u-PA) protease domain R35F/H37D/R37aN/V38E/T39Y/V41R/Y60bS/T97aI/L97bA/H 99Q/C122S/Y149R
IIGGEFTTIENQPWFAAIYFRDNGGSEYYRCGGSLISPCWVISATHCFIDSPKKEDYIVYLGRSRLNSNTQGEMKFEVENLILHKDYSADIAAQHNDIALLKIRSKEGRCAQPSRTIQTISLPSMYNDPQFGTSCEITGFGKENSTDRLYPEQLKMTVVKLISHRECQQPHYYGSEVTTKMLCAADPQWKTDSCQGDSGGPLVCSLQGRMTLTGIVSWGRGCALKDKPGVYTRVSHFLPWIRSHTKEENGLAL

SEQ ID NO: 703 - protein, 253 aa, Artificial Sequence
  UROKINASE-TYPE PLASMINOGEN ACTIVATOR (u-PA) protease domain R35Y/H37S/R37aP/V38E/T39Y/V41R/D60aP/Y60bD/T97aI/L 97bA/H99Q/C122S/Y149R
IIGGEFTTIENQPWFAAIYYRSPGGSEYYRCGGSLISPCWVISATHCFIPDPKKEDYIVYLGRSRLNSNTQGEMKFEVENLILHKDYSADIAAQHNDIALLKIRSKEGRCAQPSRTIQTISLPSMYNDPQFGTSCEITGFGKENSTDRLYPEQLKMTVVKLISHRECQQPHYYGSEVTTKMLCAADPQWKTDSCQGDSGGPLVCSLQGRMTLTGIVSWGRGCALKDKPGVYTRVSHFLPWIRSHTKEENGLAL

SEQ ID NO: 704 - protein, 253 aa, Artificial Sequence
  UROKINASE-TYPE PLASMINOGEN ACTIVATOR (u-PA) protease domain R35Q/H37Y/R37aD/V38E/T39L/V41R/D60aE/Y60bT/T97aI/L 97bA/H99Q/C122S/Y149R
IIGGEFTTIENQPWFAAIYQRYDGGSELYRCGGSLISPCWVISATHCFIETPKKEDYIVYLGRSRLNSNTQGEMKFEVENLILHKDYSADIAAQHNDIALLKIRSKEGRCAQPSRTIQTISLPSMYNDPQFGTSCEITGFGKENSTDRLYPEQLKMTVVKLISHRECQQPHYYGSEVTTKMLCAADPQWKTDSCQGDSGGPLVCSLQGRMTLTGIVSWGRGCALKDKPGVYTRVSHFLPWIRSHTKEENGLAL

SEQ ID NO: 705 - protein, 253 aa, Artificial Sequence
  UROKINASE-TYPE PLASMINOGEN ACTIVATOR (u-PA) protease domain R35W/H37P/R37aG/V38E/T39Y/V41R/D60aP/Y60bE/T97aI/L 97bA/H99Q/C122S/Y149R
IIGGEFTTIENQPWFAAIYWRPGGGSEYYRCGGSLISPCWVISATHCFIPEPKKEDYIVYLGRSRLNSNTQGEMKFEVENLILHKDYSADIAAQHNDIALLKIRSKEGRCAQPSRTIQTISLPSMYNDPQFGTSCEITGFGKENSTDRLYPEQLKMTVVKLISHRECQQPHYYGSEVTTKMLCAADPQWKTDSCQGDSGGPLVCSLQGRMTLTGIVSWGRGCALKDKPGVYTRVSHFLPWIRSHTKEENGLAL

SEQ ID NO: 706 - protein, 253 aa, Artificial Sequence
  UROKINASE-TYPE PLASMINOGEN ACTIVATOR (u-PA) protease domain N26D/F30Y/R35Y/R36H/H37E/V38E/T39F/Y40F/V41R/K61E/ T97aI/L97bA/H99Q/R110dS/P114S/C122S/Y149R/M157K
IIGGEFTTIEDQPWYAAIYYHERGGSEFFRCGGSLISPCWVISATHCFIDYPEKEDYIVYLGRSRLNSNTQGEMKFEVENLILHKDYSADIAAQHNDIALLKIRSKEGSCAQSSRTIQTISLPSMYNDPQFGTSCEITGFGKENSTDRLYPEQLKKTVVKLISHRECQQPHYYGSEVTTKMLCAADPQWKTDSCQGDSGGPLVCSLQGRMTLTGIVSWGRGCALKDKPGVYTRVSHFLPWIRSHTKEENGLAL

SEQ ID NO: 707 - protein, 253 aa, Artificial Sequence
  UROKINASE-TYPE PLASMINOGEN ACTIVATOR (u-PA) protease domain F30Y/R35Y/R36H/H37N/V38E/T39F/Y40F/V41R/K61E/R72H/ T97aI/L97bA/H99Q/C122S/Y149R/M157K/Q169K
IIGGEFTTIENQPWYAAIYYHNRGGSEFFRCGGSLISPCWVISATHCFIDYPEKEDYIVYLGRSHLNSNTQGEMKFEVENLILHKDYSADIAAQHNDIALLKIRSKEGRCAQPSRTIQTISLPSMYNDPQFGTSCEITGFGKENSTDRLYPEQLKKTVVKLISHRECKQPHYYGSEVTTKMLCAADPQWKTDSCQGDSGGPLVCSLQGRMTLTGIVSWGRGCALKDKPGVYTRVSHFLPWIRSHTKEENGLAL

SEQ ID NO: 708 - protein, 253 aa, Artificial Sequence
  UROKINASE-TYPE PLASMINOGEN ACTIVATOR (u-PA) protease domain F30Y/R35Y/R36H/H37E/V38E/T39F/Y40F/V41R/K61E/T97aI /L97bA/H99Q/C122S/Y149R/M157K/T242A
IIGGEFTTIENQPWYAAIYYHERGGSEFFRCGGSLISPCWVISATHCFIDYPEKEDYIVYLGRSRLNSNTQGEMKFEVENLILHKDYSADIAAQHNDIALLKIRSKEGRCAQPSRTIQTISLPSMYNDPQFGTSCEITGFGKENSTDRLYPEQLKKTVVKLISHRECQQPHYYGSEVTTKMLCAADPQWKTDSCQGDSGGPLVCSLQGRMTLTGIVSWGRGCALKDKPGVYTRVSHFLPWIRSHAKEENGLAL

SEQ ID NO: 709 - protein, 253 aa, Artificial Sequence
  UROKINASE-TYPE PLASMINOGEN ACTIVATOR (u-PA) protease domain F30Y/R35Q/R36H/H37G/R37aE/V38E/T39F/Y40F/V41R/D60a S/Y60bP/T97aE/L97bA/H99Q/C122S/Y149R/M157K
IIGGEFTTIENQPWYAAIYQHGEGGSEFFRCGGSLISPCWVISATHCFISPPKKEDYIVYLGRSRLNSNTQGEMKFEVENLILHKDYSADEAAQHNDIALLKIRSKEGRCAQPSRTIQTISLPSMYNDPQFGTSCEITGFGKENSTDRLYPEQLKKTVVKLISHRECQQPHYYGSEVTTKMLCAADPQWKTDSCQGDSGGPLVCSLQGRMTLTGIVSWGRGCALKDKPGVYTRVSHFLPWIRSHTKEENGLAL

SEQ ID NO: 710 - protein, 253 aa, Artificial Sequence
  UROKINASE-TYPE PLASMINOGEN ACTIVATOR (u-PA) protease domain F30Y/R35M/R36H/H37D/R37aD/V38E/T39Y/Y40F/V41R/D60a P/Y60bS/T97aE/L97bA/H99Q/C122S/Y149R/M157K
IIGGEFTTIENQPWYAAIYMHDDGGSEYFRCGGSLISPCWVISATHCFIPSPKKEDYIVYLGRSRLNSNTQGEMKFEVENLILHKDYSADEAAQHNDIALLKIRSKEGRCAQPSRTIQTISLPSMYNDPQFGTSCEITGFGKENSTDRLYPEQLKKTVVKLISHRECQQPHYYGSEVTTKMLCAADPQWKTDSCQGDSGGPLVCSLQGRMTLTGIVSWGRGCALKDKPGVYTRVSHFLPWIRSHTKEENGLAL

SEQ ID NO: 711 - protein, 253 aa, Artificial Sequence
  UROKINASE-TYPE PLASMINOGEN ACTIVATOR (u-PA) protease domain F30Y/R35Q/R36H/H37G/R37aN/V38E/T39Y/Y40F/V41R/Y60b A/T97aE/L97bA/H99Q/C122S/Y149R/M157K
IIGGEFTTIENQPWYAAIYQHGNGGSEYFRCGGSLISPCWVISATHCFIDAPKKEDYIVYLGRSRLNSNTQGEMKFEVENLILHKDYSADEAAQHNDIALLKIRSKEGRCAQPSRTIQTISLPSMYNDPQFGTSCEITGFGKENSTDRLYPEQLKKTVVKLISHRECQQPHYYGSEVTTKMLCAADPQWKTDSCQGDSGGPLVCSLQGRMTLTGIVSWGRGCALKDKPGVYTRVSHFLPWIRSHTKEENGLAL

SEQ ID NO: 712 - protein, 253 aa, Artificial Sequence
  UROKINASE-TYPE PLASMINOGEN ACTIVATOR (u-PA) protease domain F30Y/R35Q/R36H/H37G/R37aE/V38E/T39Y/Y40F/V41R/D60a P/Y60bS/T97aE/L97bA/H99Q/C122S/Y149R/M157K
IIGGEFTTIENQPWYAAIYQHGEGGSEYFRCGGSLISPCWVISATHCFIPSPKKEDYIVYLGRSRLNSNTQGEMKFEVENLILHKDYSADEAAQHNDIALLKIRSKEGRCAQPSRTIQTISLPSMYNDPQFGTSCEITGFGKENSTDRLYPEQLKKTVVKLISHRECQQPHYYGSEVTTKMLCAADPQWKTDSCQGDSGGPLVCSLQGRMTLTGIVSWGRGCALKDKPGVYTRVSHFLPWIRSHTKEENGLAL

SEQ ID NO: 713 - protein, 253 aa, Artificial Sequence
  UROKINASE-TYPE PLASMINOGEN ACTIVATOR (u-PA) protease domain F30Y/R35W/R36H/H37D/R37aE/V38E/T39Y/Y40F/V41R/D60a E/Y60bF/T97aE/L97bA/H99Q/C122S/Y149R/M157K
IIGGEFTTIENQPWYAAIYWHDEGGSEYFRCGGSLISPCWVISATHCFIEFPKKEDYIVYLGRSRLNSNTQGEMKFEVENLILHKDYSADEAAQHNDIALLKIRSKEGRCAQPSRTIQTISLPSMYNDPQFGTSCEITGFGKENSTDRLYPEQLKKTVVKLISHRECQQPHYYGSEVTTKMLCAADPQWKTDSCQGDSGGPLVCSLQGRMTLTGIVSWGRGCALKDKPGVYTRVSHFLPWIRSHTKEENGLAL

SEQ ID NO: 714 - protein, 253 aa, Artificial Sequence
  UROKINASE-TYPE PLASMINOGEN ACTIVATOR (u-PA) protease domain F30Y/R35Q/R36H/H37Y/R37aE/V38E/T39Y/Y40F/V41R/D60a S/Y60bP/T97aE/L97bA/H99Q/C122S/Y149R/M157K
IIGGEFTTIENQPWYAAIYQHYEGGSEYFRCGGSLISPCWVISATHCFISPPKKEDYIVYLGRSRLNSNTQGEMKFEVENLILHKDYSADEAAQHNDIALLKIRSKEGRCAQPSRTIQTISLPSMYNDPQFGTSCEITGFGKENSTDRLYPEQLKKTVVKLISHRECQQPHYYGSEVTTKMLCAADPQWKTDSCQGDSGGPLVCSLQGRMTLTGIVSWGRGCALKDKPGVYTRVSHFLPWIRSHTKEENGLAL

SEQ ID NO: 715 - protein, 253 aa, Artificial Sequence
  UROKINASE-TYPE PLASMINOGEN ACTIVATOR (u-PA) protease domain F30Y/R35Q/R36H/H37Y/R37aD/V38E/T39Y/Y40F/V41R/Y60b V/T97aE/L97bA/H99Q/C122S/Y149R/M157K
IIGGEFTTIENQPWYAAIYQHYDGGSEYFRCGGSLISPCWVISATHCFIDVPKKEDYIVYLGRSRLNSNTQGEMKFEVENLILHKDYSADEAAQHNDIALLKIRSKEGRCAQPSRTIQTISLPSMYNDPQFGTSCEITGFGKENSTDRLYPEQLKKTVVKLISHRECQQPHYYGSEVTTKMLCAADPQWKTDSCQGDSGGPLVCSLQGRMTLTGIVSWGRGCALKDKPGVYTRVSHFLPWIRSHTKEENGLAL

SEQ ID NO: 716 - protein, 253 aa, Artificial Sequence
  UROKINASE-TYPE PLASMINOGEN ACTIVATOR (u-PA) protease domain F30Y/R35A/R36H/H37T/R37aD/V38E/T39Y/Y40L/V41R/D60a P/Y60bE/T97aE/L97bA/H99Q/C122S/Y149R/M157K
IIGGEFTTIENQPWYAAIYAHTDGGSEYLRCGGSLISPCWVISATHCFIPEPKKEDYIVYLGRSRLNSNTQGEMKFEVENLILHKDYSADEAAQHNDIALLKIRSKEGRCAQPSRTIQTISLPSMYNDPQFGTSCEITGFGKENSTDRLYPEQLKKTVVKLISHRECQQPHYYGSEVTTKMLCAADPQWKTDSCQGDSGGPLVCSLQGRMTLTGIVSWGRGCALKDKPGVYTRVSHFLPWIRSHTKEENGLAL

SEQ ID NO: 717 - protein, 253 aa, Artificial Sequence
  UROKINASE-TYPE PLASMINOGEN ACTIVATOR (u-PA) protease domain F30Y/R35W/R36H/H37S/V38E/T39Y/Y40F/V41R/Y60bN/T97a E/L97bA/H99Q/C122S/N145S/S146V/T147M/D148G/Y149Q/L 150F/M157K
IIGGEFTTIENQPWYAAIYWHSRGGSEYFRCGGSLISPCWVISATHCFIDNPKKEDYIVYLGRSRLNSNTQGEMKFEVENLILHKDYSADEAAQHNDIALLKIRSKEGRCAQPSRTIQTISLPSMYNDPQFGTSCEITGFGKESVMGQFYPEQLKKTVVKLISHRECQQPHYYGSEVTTKMLCAADPQWKTDSCQGDSGGPLVCSLQGRMTLTGIVSWGRGCALKDKPGVYTRVSHFLPWIRSHTKEENGLAL

SEQ ID NO: 718 - protein, 253 aa, Artificial Sequence
  UROKINASE-TYPE PLASMINOGEN ACTIVATOR (u-PA) protease domain F30Y/R35Q/R36H/H37G/R37aE/V38E/T39F/Y40F/V41R/D60a P/Y60bS/T97aE/L97bA/H99Q/C122S/Y149R/M157K
IIGGEFTTIENQPWYAAIYQHGEGGSEFFRCGGSLISPCWVISATHCFIPSPKKEDYIVYLGRSRLNSNTQGEMKFEVENLILHKDYSADEAAQHNDIALLKIRSKEGRCAQPSRTIQTISLPSMYNDPQFGTSCEITGFGKENSTDRLYPEQLKKTVVKLISHRECQQPHYYGSEVTTKMLCAADPQWKTDSCQGDSGGPLVCSLQGRMTLTGIVSWGRGCALKDKPGVYTRVSHFLPWIRSHTKEENGLAL

SEQ ID NO: 719 - protein, 253 aa, Artificial Sequence
  UROKINASE-TYPE PLASMINOGEN ACTIVATOR (u-PA) protease domain F30Y/R35Q/R36H/H37G/R37aL/V38E/T39N/Y40F/V41R/D60a P/Y60bT/T97aE/L97bA/H99Q/C122S/Y149R/M157K
IIGGEFTTIENQPWYAAIYQHGLGGSENFRCGGSLISPCWVISATHCFIPTPKKEDYIVYLGRSRLNSNTQGEMKFEVENLILHKDYSADEAAQHNDIALLKIRSKEGRCAQPSRTIQTISLPSMYNDPQFGTSCEITGFGKENSTDRLYPEQLKKTVVKLISHRECQQPHYYGSEVTTKMLCAADPQWKTDSCQGDSGGPLVCSLQGRMTLTGIVSWGRGCALKDKPGVYTRVSHFLPWIRSHTKEENGLAL

SEQ ID NO: 720 - protein, 253 aa, Artificial Sequence
  UROKINASE-TYPE PLASMINOGEN ACTIVATOR (u-PA) protease domain F30Y/R35E/R36H/H37D/R37aN/V38E/T39Y/Y40F/V41R/Y60b N/T97aE/L97bA/H99Q/C122S/Y149R/M157K
IIGGEFTTIENQPWYAAIYEHDNGGSEYFRCGGSLISPCWVISATHCFIDNPKKEDYIVYLGRSRLNSNTQGEMKFEVENLILHKDYSADEAAQHNDIALLKIRSKEGRCAQPSRTIQTISLPSMYNDPQFGTSCEITGFGKENSTDRLYPEQLKKTVVKLISHRECQQPHYYGSEVTTKMLCAADPQWKTDSCQGDSGGPLVCSLQGRMTLTGIVSWGRGCALKDKPGVYTRVSHFLPWIRSHTKEENGLAL

SEQ ID NO: 721 - protein, 253 aa, Artificial Sequence
  UROKINASE-TYPE PLASMINOGEN ACTIVATOR (u-PA) protease domain F30Y/R36H/H37M/R37aD/V38E/T39G/Y40F/V41R/D60aP/Y60 bE/T97aE/L97bA/H99Q/C122S/Y149R/M157K
IIGGEFTTIENQPWYAAIYRHMDGGSEGFRCGGSLISPCWVISATHCFIPEPKKEDYIVYLGRSRLNSNTQGEMKFEVENLILHKDYSADEAAQHNDIALLKIRSKEGRCAQPSRTIQTISLPSMYNDPQFGTSCEITGFGKENSTDRLYPEQLKKTVVKLISHRECQQPHYYGSEVTTKMLCAADPQWKTDSCQGDSGGPLVCSLQGRMTLTGIVSWGRGCALKDKPGVYTRVSHFLPWIRSHTKEENGLAL

SEQ ID NO: 722 - protein, 253 aa, Artificial Sequence
  UROKINASE-TYPE PLASMINOGEN ACTIVATOR (u-PA) protease domain F30Y/R35W/R36H/H37E/R37aP/V38E/T39Y/Y40F/V41R/Y60b N/T97aE/L97bA/H99Q/C122S/Y149Q/M157K
IIGGEFTTIENQPWYAAIYWHEPGGSEYFRCGGSLISPCWVISATHCFIDNPKKEDYIVYLGRSRLNSNTQGEMKFEVENLILHKDYSADEAAQHNDIALLKIRSKEGRCAQPSRTIQTISLPSMYNDPQFGTSCEITGFGKENSTDQLYPEQLKKTVVKLISHRECQQPHYYGSEVTTKMLCAADPQWKTDSCQGDSGGPLVCSLQGRMTLTGIVSWGRGCALKDKPGVYTRVSHFLPWIRSHTKEENGLAL

SEQ ID NO: 723 - protein, 253 aa, Artificial Sequence
  UROKINASE-TYPE PLASMINOGEN ACTIVATOR (u-PA) protease domain F30Y/R35Q/R36H/H37D/R37aE/V38E/T39Y/Y40F/V41R/D60a E/Y60bG/T97aE/L97bA/H99Q/C122S/Y149R/M157K
IIGGEFTTIENQPWYAAIYQHDEGGSEYFRCGGSLISPCWVISATHCFIEGPKKEDYIVYLGRSRLNSNTQGEMKFEVENLILHKDYSADEAAQHNDIALLKIRSKEGRCAQPSRTIQTISLPSMYNDPQFGTSCEITGFGKENSTDRLYPEQLKKTVVKLISHRECQQPHYYGSEVTTKMLCAADPQWKTDSCQGDSGGPLVCSLQGRMTLTGIVSWGRGCALKDKPGVYTRVSHFLPWIRSHTKEENGLAL

SEQ ID NO: 724 - protein, 253 aa, Artificial Sequence
  UROKINASE-TYPE PLASMINOGEN ACTIVATOR (u-PA) protease domain F30Y/R35Y/R36H/H37P/R37aQ/V38E/T39Y/Y40F/V41R/Y60b H/T97aE/L97bA/H99Q/C122S/Y149R/M157K
IIGGEFTTIENQPWYAAIYYHPQGGSEYFRCGGSLISPCWVISATHCFIDHPKKEDYIVYLGRSRLNSNTQGEMKFEVENLILHKDYSADEAAQHNDIALLKIRSKEGRCAQPSRTIQTISLPSMYNDPQFGTSCEITGFGKENSTDRLYPEQLKKTVVKLISHRECQQPHYYGSEVTTKMLCAADPQWKTDSCQGDSGGPLVCSLQGRMTLTGIVSWGRGCALKDKPGVYTRVSHFLPWIRSHTKEENGLAL

SEQ ID NO: 725 - protein, 253 aa, Artificial Sequence
  UROKINASE-TYPE PLASMINOGEN ACTIVATOR (u-PA) protease domain F30Y/R35F/R36H/H37D/R37aD/V38E/T39H/Y40F/V41R/D60a P/Y60bA/T97aE/L97bA/H99Q/C122S/Y149R/M157K
IIGGEFTTIENQPWYAAIYFHDDGGSEHFRCGGSLISPCWVISATHCFIPAPKKEDYIVYLGRSRLNSNTQGEMKFEVENLILHKDYSADEAAQHNDIALLKIRSKEGRCAQPSRTIQTISLPSMYNDPQFGTSCEITGFGKENSTDRLYPEQLKKTVVKLISHRECQQPHYYGSEVTTKMLCAADPQWKTDSCQGDSGGPLVCSLQGRMTLTGIVSWGRGCALKDKPGVYTRVSHFLPWIRSHTKEENGLAL

SEQ ID NO: 726 - protein, 253 aa, Artificial Sequence
  UROKINASE-TYPE PLASMINOGEN ACTIVATOR (u-PA) protease domain F30Y/R35Q/R36H/H37Y/R37aE/V38E/T39Y/Y40F/V41R/D60a E/Y60bA/T97aE/L97bA/H99Q/C122S/Y149R/M157K
IIGGEFTTIENQPWYAAIYQHYEGGSEYFRCGGSLISPCWVISATHCFIEAPKKEDYIVYLGRSRLNSNTQGEMKFEVENLILHKDYSADEAAQHNDIALLKIRSKEGRCAQPSRTIQTISLPSMYNDPQFGTSCEITGFGKENSTDRLYPEQLKKTVVKLISHRECQQPHYYGSEVTTKMLCAADPQWKTDSCQGDSGGPLVCSLQGRMTLTGIVSWGRGCALKDKPGVYTRVSHFLPWIRSHTKEENGLAL

SEQ ID NO: 727 - protein, 253 aa, Artificial Sequence
  UROKINASE-TYPE PLASMINOGEN ACTIVATOR (u-PA) protease domain F30Y/R35W/R36H/H37P/R37aD/V38E/T39Y/Y40F/V41R/D60a E/Y60bS/T97aE/L97bA/H99Q/C122S/Y149R/M157K
IIGGEFTTIENQPWYAAIYWHPDGGSEYFRCGGSLISPCWVISATHCFIESPKKEDYIVYLGRSRLNSNTQGEMKFEVENLILHKDYSADEAAQHNDIALLKIRSKEGRCAQPSRTIQTISLPSMYNDPQFGTSCEITGFGKENSTDRLYPEQLKKTVVKLISHRECQQPHYYGSEVTTKMLCAADPQWKTDSCQGDSGGPLVCSLQGRMTLTGIVSWGRGCALKDKPGVYTRVSHFLPWIRSHTKEENGLAL

SEQ ID NO: 728 - protein, 253 aa, Artificial Sequence
  UROKINASE-TYPE PLASMINOGEN ACTIVATOR (u-PA) protease domain F30Y/R35Q/R36H/H37G/R37aE/V38E/T39Y/Y40F/V41R/D60a A/Y60bS/T97aE/L97bA/H99Q/C122S/Y149R/M157K
IIGGEFTTIENQPWYAAIYQHGEGGSEYFRCGGSLISPCWVISATHCFIASPKKEDYIVYLGRSRLNSNTQGEMKFEVENLILHKDYSADEAAQHNDIALLKIRSKEGRCAQPSRTIQTISLPSMYNDPQFGTSCEITGFGKENSTDRLYPEQLKKTVVKLISHRECQQPHYYGSEVTTKMLCAADPQWKTDSCQGDSGGPLVCSLQGRMTLTGIVSWGRGCALKDKPGVYTRVSHFLPWIRSHTKEENGLAL

SEQ ID NO: 729 - protein, 253 aa, Artificial Sequence
  UROKINASE-TYPE PLASMINOGEN ACTIVATOR (u-PA) protease domain F30Y/R35M/R36H/H37G/R37aE/V38E/T39Y/Y40F/V41R/D60a P/Y60bS/T97aE/L97bA/H99Q/C122S/Y149R/M157K
IIGGEFTTIENQPWYAAIYMHGEGGSEYFRCGGSLISPCWVISATHCFIPSPKKEDYIVYLGRSRLNSNTQGEMKFEVENLILHKDYSADEAAQHNDIALLKIRSKEGRCAQPSRTIQTISLPSMYNDPQFGTSCEITGFGKENSTDRLYPEQLKKTVVKLISHRECQQPHYYGSEVTTKMLCAADPQWKTDSCQGDSGGPLVCSLQGRMTLTGIVSWGRGCALKDKPGVYTRVSHFLPWIRSHTKEENGLAL

SEQ ID NO: 730 - protein, 253 aa, Artificial Sequence
  UROKINASE-TYPE PLASMINOGEN ACTIVATOR (u-PA) protease domain F30Y/R36H/H37D/R37aE/V38E/T39Y/Y40F/V41R/Y60bN/T97 aE/L97bA/H99Q/C122S/Y149R/M157K
IIGGEFTTIENQPWYAAIYRHDEGGSEYFRCGGSLISPCWVISATHCFIDNPKKEDYIVYLGRSRLNSNTQGEMKFEVENLILHKDYSADEAAQHNDIALLKIRSKEGRCAQPSRTIQTISLPSMYNDPQFGTSCEITGFGKENSTDRLYPEQLKKTVVKLISHRECQQPHYYGSEVTTKMLCAADPQWKTDSCQGDSGGPLVCSLQGRMTLTGIVSWGRGCALKDKPGVYTRVSHFLPWIRSHTKEENGLAL

SEQ ID NO: 731 - protein, 253 aa, Artificial Sequence
  UROKINASE-TYPE PLASMINOGEN ACTIVATOR (u-PA) protease domain F30Y/R35W/R36H/H37P/R37aQ/V38E/T39Y/Y40F/V41R/Y60b Q/T97aE/L97bA/H99Q/C122S/Y149R/M157K
IIGGEFTTIENQPWYAAIYWHPQGGSEYFRCGGSLISPCWVISATHCFIDQPKKEDYIVYLGRSRLNSNTQGEMKFEVENLILHKDYSADEAAQHNDIALLKIRSKEGRCAQPSRTIQTISLPSMYNDPQFGTSCEITGFGKENSTDRLYPEQLKKTVVKLISHRECQQPHYYGSEVTTKMLCAADPQWKTDSCQGDSGGPLVCSLQGRMTLTGIVSWGRGCALKDKPGVYTRVSHFLPWIRSHTKEENGLAL

SEQ ID NO: 732 - protein, 253 aa, Artificial Sequence
  UROKINASE-TYPE PLASMINOGEN ACTIVATOR (u-PA) protease domain F30Y/R35W/R36H/H37P/R37aE/V38E/T39Y/Y40F/V41R/Y60b A/T97aE/L97bA/H99Q/C122S/Y149R/M157K
IIGGEFTTIENQPWYAAIYWHPEGGSEYFRCGGSLISPCWVISATHCFIDAPKKEDYIVYLGRSRLNSNTQGEMKFEVENLILHKDYSADEAAQHNDIALLKIRSKEGRCAQPSRTIQTISLPSMYNDPQFGTSCEITGFGKENSTDRLYPEQLKKTVVKLISHRECQQPHYYGSEVTTKMLCAADPQWKTDSCQGDSGGPLVCSLQGRMTLTGIVSWGRGCALKDKPGVYTRVSHFLPWIRSHTKEENGLAL

SEQ ID NO: 733 - protein, 253 aa, Artificial Sequence
  UROKINASE-TYPE PLASMINOGEN ACTIVATOR (u-PA) protease domain R35Q/H37Y/R37aE/V38E/T39Y/V41R/D60aA/Y60bP/T97aI/L 97bA/H99Q/C122S/Y149R
IIGGEFTTIENQPWFAAIYQRYEGGSEYYRCGGSLISPCWVISATHCFIAPPKKEDYIVYLGRSRLNSNTQGEMKFEVENLILHKDYSADIAAQHNDIALLKIRSKEGRCAQPSRTIQTISLPSMYNDPQFGTSCEITGFGKENSTDRLYPEQLKMTVVKLISHRECQQPHYYGSEVTTKMLCAADPQWKTDSCQGDSGGPLVCSLQGRMTLTGIVSWGRGCALKDKPGVYTRVSHFLPWIRSHTKEENGLAL

SEQ ID NO: 734 - protein, 253 aa, Artificial Sequence
  UROKINASE-TYPE PLASMINOGEN ACTIVATOR (u-PA) protease domain R35L/H37D/R37aS/V38E/T39Y/V41R/D60aP/Y60bD/T97aI/L 97bA/H99Q/C122S/Y149R
IIGGEFTTIENQPWFAAIYLRDSGGSEYYRCGGSLISPCWVISATHCFIPDPKKEDYIVYLGRSRLNSNTQGEMKFEVENLILHKDYSADIAAQHNDIALLKIRSKEGRCAQPSRTIQTISLPSMYNDPQFGTSCEITGFGKENSTDRLYPEQLKMTVVKLISHRECQQPHYYGSEVTTKMLCAADPQWKTDSCQGDSGGPLVCSLQGRMTLTGIVSWGRGCALKDKPGVYTRVSHFLPWIRSHTKEENGLAL

SEQ ID NO: 735 - protein, 253 aa, Artificial Sequence
  UROKINASE-TYPE PLASMINOGEN ACTIVATOR (u-PA) protease domain R35M/H37G/R37aD/V38E/T39W/V41R/D60aP/Y60bD/T97aI/L 97bA/H99Q/C122S/Y149R
IIGGEFTTIENQPWFAAIYMRGDGGSEWYRCGGSLISPCWVISATHCFIPDPKKEDYIVYLGRSRLNSNTQGEMKFEVENLILHKDYSADIAAQHNDIALLKIRSKEGRCAQPSRTIQTISLPSMYNDPQFGTSCEITGFGKENSTDRLYPEQLKMTVVKLISHRECQQPHYYGSEVTTKMLCAADPQWKTDSCQGDSGGPLVCSLQGRMTLTGIVSWGRGCALKDKPGVYTRVSHFLPWIRSHTKEENGLAL

SEQ ID NO: 736 - protein, 253 aa, Artificial Sequence
  UROKINASE-TYPE PLASMINOGEN ACTIVATOR (u-PA) protease domain R35Q/H37G/R37aP/V38E/T39Y/V41R/D60aP/Y60bE/T97aI/L 97bA/H99Q/C122S/Y149R
IIGGEFTTIENQPWFAAIYQRGPGGSEYYRCGGSLISPCWVISATHCFIPEPKKEDYIVYLGRSRLNSNTQGEMKFEVENLILHKDYSADIAAQHNDIALLKIRSKEGRCAQPSRTIQTISLPSMYNDPQFGTSCEITGFGKENSTDRLYPEQLKMTVVKLISHRECQQPHYYGSEVTTKMLCAADPQWKTDSCQGDSGGPLVCSLQGRMTLTGIVSWGRGCALKDKPGVYTRVSHFLPWIRSHTKEENGLAL

SEQ ID NO: 737 - protein, 253 aa, Artificial Sequence
  UROKINASE-TYPE PLASMINOGEN ACTIVATOR (u-PA) protease domain R35A/H37G/R37aE/V38E/T39F/V41R/D60aE/Y60bP/T97aI/L 97bA/H99Q/C122S/Y149R
IIGGEFTTIENQPWFAAIYARGEGGSEFYRCGGSLISPCWVISATHCFIEPPKKEDYIVYLGRSRLNSNTQGEMKFEVENLILHKDYSADIAAQHNDIALLKIRSKEGRCAQPSRTIQTISLPSMYNDPQFGTSCEITGFGKENSTDRLYPEQLKMTVVKLISHRECQQPHYYGSEVTTKMLCAADPQWKTDSCQGDSGGPLVCSLQGRMTLTGIVSWGRGCALKDKPGVYTRVSHFLPWIRSHTKEENGLAL

SEQ ID NO: 738 - protein, 253 aa, Artificial Sequence
  UROKINASE-TYPE PLASMINOGEN ACTIVATOR (u-PA) protease domain R35Q/H37S/R37aE/V38E/T39Y/V41R/D60aP/Y60bS/T97aI/L 97bA/H99Q/C122S/Y149R
IIGGEFTTIENQPWFAAIYQRSEGGSEYYRCGGSLISPCWVISATHCFIPSPKKEDYIVYLGRSRLNSNTQGEMKFEVENLILHKDYSADIAAQHNDIALLKIRSKEGRCAQPSRTIQTISLPSMYNDPQFGTSCEITGFGKENSTDRLYPEQLKMTVVKLISHRECQQPHYYGSEVTTKMLCAADPQWKTDSCQGDSGGPLVCSLQGRMTLTGIVSWGRGCALKDKPGVYTRVSHFLPWIRSHTKEENGLAL

SEQ ID NO: 739 - protein, 253 aa, Artificial Sequence
  UROKINASE-TYPE PLASMINOGEN ACTIVATOR (u-PA) protease domain R35Q/H37T/R37aP/V38E/T39Y/V41R/D60aE/Y60bD/T97aI/L 97bA/H99Q/C122S/Y149R
IIGGEFTTIENQPWFAAIYQRTPGGSEYYRCGGSLISPCWVISATHCFIEDPKKEDYIVYLGRSRLNSNTQGEMKFEVENLILHKDYSADIAAQHNDIALLKIRSKEGRCAQPSRTIQTISLPSMYNDPQFGTSCEITGFGKENSTDRLYPEQLKMTVVKLISHRECQQPHYYGSEVTTKMLCAADPQWKTDSCQGDSGGPLVCSLQGRMTLTGIVSWGRGCALKDKPGVYTRVSHFLPWIRSHTKEENGLAL

SEQ ID NO: 740 - protein, 253 aa, Artificial Sequence
  UROKINASE-TYPE PLASMINOGEN ACTIVATOR (u-PA) protease domain R35Q/H37G/R37aE/V38E/T39H/V41R/D60aP/Y60bA/T97aI/L 97bA/H99Q/C122S/Y149R
IIGGEFTTIENQPWFAAIYQRGEGGSEHYRCGGSLISPCWVISATHCFIPAPKKEDYIVYLGRSRLNSNTQGEMKFEVENLILHKDYSADIAAQHNDIALLKIRSKEGRCAQPSRTIQTISLPSMYNDPQFGTSCEITGFGKENSTDRLYPEQLKMTVVKLISHRECQQPHYYGSEVTTKMLCAADPQWKTDSCQGDSGGPLVCSLQGRMTLTGIVSWGRGCALKDKPGVYTRVSHFLPWIRSHTKEENGLAL

SEQ ID NO: 741 - protein, 253 aa, Artificial Sequence
  UROKINASE-TYPE PLASMINOGEN ACTIVATOR (u-PA) protease domain R35W/H37D/R37aS/V38E/T39Y/V41R/D60aE/Y60bS/T97aI/L 97bA/H99Q/C122S/Y149R
IIGGEFTTIENQPWFAAIYWRDSGGSEYYRCGGSLISPCWVISATHCFIESPKKEDYIVYLGRSRLNSNTQGEMKFEVENLILHKDYSADIAAQHNDIALLKIRSKEGRCAQPSRTIQTISLPSMYNDPQFGTSCEITGFGKENSTDRLYPEQLKMTVVKLISHRECQQPHYYGSEVTTKMLCAADPQWKTDSCQGDSGGPLVCSLQGRMTLTGIVSWGRGCALKDKPGVYTRVSHFLPWIRSHTKEENGLAL

SEQ ID NO: 742 - protein, 253 aa, Artificial Sequence
  UROKINASE-TYPE PLASMINOGEN ACTIVATOR (u-PA) protease domain R35Q/H37G/R37aE/V38E/T39Y/V41R/D60aP/Y60bT/T97aI/L 97bA/H99Q/C122S/Y149R
IIGGEFTTIENQPWFAAIYQRGEGGSEYYRCGGSLISPCWVISATHCFIPTPKKEDYIVYLGRSRLNSNTQGEMKFEVENLILHKDYSADIAAQHNDIALLKIRSKEGRCAQPSRTIQTISLPSMYNDPQFGTSCEITGFGKENSTDRLYPEQLKMTVVKLISHRECQQPHYYGSEVTTKMLCAADPQWKTDSCQGDSGGPLVCSLQGRMTLTGIVSWGRGCALKDKPGVYTRVSHFLPWIRSHTKEENGLAL

SEQ ID NO: 743 - protein, 253 aa, Artificial Sequence
  UROKINASE-TYPE PLASMINOGEN ACTIVATOR (u-PA) protease domain R35Q/H37Y/R37aE/V38E/T39Y/V41R/D60aG/Y60bS/T97aI/L 97bA/H99Q/C122S/Y149R
IIGGEFTTIENQPWFAAIYQRYEGGSEYYRCGGSLISPCWVISATHCFIGSPKKEDYIVYLGRSRLNSNTQGEMKFEVENLILHKDYSADIAAQHNDIALLKIRSKEGRCAQPSRTIQTISLPSMYNDPQFGTSCEITGFGKENSTDRLYPEQLKMTVVKLISHRECQQPHYYGSEVTTKMLCAADPQWKTDSCQGDSGGPLVCSLQGRMTLTGIVSWGRGCALKDKPGVYTRVSHFLPWIRSHTKEENGLAL

SEQ ID NO: 744 - protein, 253 aa, Artificial Sequence
  UROKINASE-TYPE PLASMINOGEN ACTIVATOR (u-PA) protease domain R35W/H37P/R37aN/V38E/T39Y/V41R/D60aP/Y60bL/D97T/T9 7aE/L97bG/A98S/H99L/C122S
IIGGEFTTIENQPWFAAIYWRPNGGSEYYRCGGSLISPCWVISATHCFIPLPKKEDYIVYLGRSRLNSNTQGEMKFEVENLILHKDYSATEGSLHNDIALLKIRSKEGRCAQPSRTIQTISLPSMYNDPQFGTSCEITGFGKENSTDYLYPEQLKMTVVKLISHRECQQPHYYGSEVTTKMLCAADPQWKTDSCQGDSGGPLVCSLQGRMTLTGIVSWGRGCALKDKPGVYTRVSHFLPWIRSHTKEENGLAL

SEQ ID NO: 745 - protein, 253 aa, Artificial Sequence
  UROKINASE-TYPE PLASMINOGEN ACTIVATOR (u-PA) protease domain R35W/H37P/R37aN/V38E/T39Y/V41K/D60aP/Y60bD/T97aI/L 97bA/H99Q/C122S/Y151L/Q192A
IIGGEFTTIENQPWFAAIYWRPNGGSEYYKCGGSLISPCWVISATHCFIPDPKKEDYIVYLGRSRLNSNTQGEMKFEVENLILHKDYSADIAAQHNDIALLKIRSKEGRCAQPSRTIQTISLPSMYNDPQFGTSCEITGFGKENSTDYLLPEQLKMTVVKLISHRECQQPHYYGSEVTTKMLCAADPQWKTDSCAGDSGGPLVCSLQGRMTLTGIVSWGRGCALKDKPGVYTRVSHFLPWIRSHTKEENGLAL

SEQ ID NO: 746 - protein, 253 aa, Artificial Sequence
  UROKINASE-TYPE PLASMINOGEN ACTIVATOR (u-PA) protease domain R35Y/H37V/R37aW/V38E/T39Y/V41R/D60aP/Y60bE/T97aI/L 97bA/H99Q/C122S/Y151L/Q192T
IIGGEFTTIENQPWFAAIYYRVWGGSEYYRCGGSLISPCWVISATHCFIPEPKKEDYIVYLGRSRLNSNTQGEMKFEVENLILHKDYSADIAAQHNDIALLKIRSKEGRCAQPSRTIQTISLPSMYNDPQFGTSCEITGFGKENSTDYLLPEQLKMTVVKLISHRECQQPHYYGSEVTTKMLCAADPQWKTDSCTGDSGGPLVCSLQGRMTLTGIVSWGRGCALKDKPGVYTRVSHFLPWIRSHTKEENGLAL

SEQ ID NO: 747 - protein, 253 aa, Artificial Sequence
  UROKINASE-TYPE PLASMINOGEN ACTIVATOR (u-PA) protease domain R35W/H37P/R37aN/V38E/T39Y/V41K/D60aP/Y60bD/T97aI/L 97bA/H99Q/C122S/Y151L/Q192T
IIGGEFTTIENQPWFAAIYWRPNGGSEYYKCGGSLISPCWVISATHCFIPDPKKEDYIVYLGRSRLNSNTQGEMKFEVENLILHKDYSADIAAQHNDIALLKIRSKEGRCAQPSRTIQTISLPSMYNDPQFGTSCEITGFGKENSTDYLLPEQLKMTVVKLISHRECQQPHYYGSEVTTKMLCAADPQWKTDSCTGDSGGPLVCSLQGRMTLTGIVSWGRGCALKDKPGVYTRVSHFLPWIRSHTKEENGLAL

SEQ ID NO: 748 - protein, 253 aa, Artificial Sequence
  UROKINASE-TYPE PLASMINOGEN ACTIVATOR (u-PA) protease domain H37T/R37aL/V38E/T39Y/V41R/D60aP/Y60bD/T97aI/L97bA/ H99Q/C122S/Y151L/Q192R
IIGGEFTTIENQPWFAAIYRRTLGGSEYYRCGGSLISPCWVISATHCFIPDPKKEDYIVYLGRSRLNSNTQGEMKFEVENLILHKDYSADIAAQHNDIALLKIRSKEGRCAQPSRTIQTISLPSMYNDPQFGTSCEITGFGKENSTDYLLPEQLKMTVVKLISHRECQQPHYYGSEVTTKMLCAADPQWKTDSCRGDSGGPLVCSLQGRMTLTGIVSWGRGCALKDKPGVYTRVSHFLPWIRSHTKEENGLAL

SEQ ID NO: 749 - protein, 253 aa, Artificial Sequence
  UROKINASE-TYPE PLASMINOGEN ACTIVATOR (u-PA) protease domain R35Y/H37S/R37aP/V38E/T39Y/V41R/D60aP/Y60bD/T97aI/L 97bA/H99Q/C122S/Y151L
IIGGEFTTIENQPWFAAIYYRSPGGSEYYRCGGSLISPCWVISATHCFIPDPKKEDYIVYLGRSRLNSNTQGEMKFEVENLILHKDYSADIAAQHNDIALLKIRSKEGRCAQPSRTIQTISLPSMYNDPQFGTSCEITGFGKENSTDYLLPEQLKMTVVKLISHRECQQPHYYGSEVTTKMLCAADPQWKTDSCQGDSGGPLVCSLQGRMTLTGIVSWGRGCALKDKPGVYTRVSHFLPWIRSHTKEENGLAL

SEQ ID NO: 750 - protein, 253 aa, Artificial Sequence
  UROKINASE-TYPE PLASMINOGEN ACTIVATOR (u-PA) protease domain R35Y/H37S/R37aP/V38E/T39Y/V41R/D60aP/Y60bD/T97aI/L 97bA/H99Q/C122S/Y151L/Q192H
IIGGEFTTIENQPWFAAIYYRSPGGSEYYRCGGSLISPCWVISATHCFIPDPKKEDYIVYLGRSRLNSNTQGEMKFEVENLILHKDYSADIAAQHNDIALLKIRSKEGRCAQPSRTIQTISLPSMYNDPQFGTSCEITGFGKENSTDYLLPEQLKMTVVKLISHRECQQPHYYGSEVTTKMLCAADPQWKTDSCHGDSGGPLVCSLQGRMTLTGIVSWGRGCALKDKPGVYTRVSHFLPWIRSHTKEENGLAL

SEQ ID NO: 751 - protein, 253 aa, Artificial Sequence
  UROKINASE-TYPE PLASMINOGEN ACTIVATOR (u-PA) protease domain R35A/H37E/R37aG/V38E/T39Y/V41R/D60aP/Y60bD/T97aI/L 97bA/H99Q/C122S/Y151L
IIGGEFTTIENQPWFAAIYAREGGGSEYYRCGGSLISPCWVISATHCFIPDPKKEDYIVYLGRSRLNSNTQGEMKFEVENLILHKDYSADIAAQHNDIALLKIRSKEGRCAQPSRTIQTISLPSMYNDPQFGTSCEITGFGKENSTDYLLPEQLKMTVVKLISHRECQQPHYYGSEVTTKMLCAADPQWKTDSCQGDSGGPLVCSLQGRMTLTGIVSWGRGCALKDKPGVYTRVSHFLPWIRSHTKEENGLAL

SEQ ID NO: 752 - protein, 253 aa, Artificial Sequence
  UROKINASE-TYPE PLASMINOGEN ACTIVATOR (u-PA) protease domain R35W/H37G/R37aE/V38E/T39Y/V41R/D60aP/Y60bD/T97aI/L 97bA/H99Q/C122S/Y151L/Q192T
IIGGEFTTIENQPWFAAIYWRGEGGSEYYRCGGSLISPCWVISATHCFIPDPKKEDYIVYLGRSRLNSNTQGEMKFEVENLILHKDYSADIAAQHNDIALLKIRSKEGRCAQPSRTIQTISLPSMYNDPQFGTSCEITGFGKENSTDYLLPEQLKMTVVKLISHRECQQPHYYGSEVTTKMLCAADPQWKTDSCTGDSGGPLVCSLQGRMTLTGIVSWGRGCALKDKPGVYTRVSHFLPWIRSHTKEENGLAL

SEQ ID NO: 753 - protein, 253 aa, Artificial Sequence
  UROKINASE-TYPE PLASMINOGEN ACTIVATOR (u-PA) protease domain R35Y/H37S/R37aP/V38E/T39Y/V41R/D60aP/Y60bD/T97aI/L 97bA/H99Q/C122S
IIGGEFTTIENQPWFAAIYYRSPGGSEYYRCGGSLISPCWVISATHCFIPDPKKEDYIVYLGRSRLNSNTQGEMKFEVENLILHKDYSADIAAQHNDIALLKIRSKEGRCAQPSRTIQTISLPSMYNDPQFGTSCEITGFGKENSTDYLYPEQLKMTVVKLISHRECQQPHYYGSEVTTKMLCAADPQWKTDSCQGDSGGPLVCSLQGRMTLTGIVSWGRGCALKDKPGVYTRVSHFLPWIRSHTKEENGLAL

SEQ ID NO: 754 - protein, 253 aa, Artificial Sequence
  UROKINASE-TYPE PLASMINOGEN ACTIVATOR (u-PA) protease domain R35A/H37T/R37aD/V38E/T39Y/V41R/D60aP/Y60bD/T97aI/L 97bA/H99Q/C122S/Y151L/Q192S
IIGGEFTTIENQPWFAAIYARTDGGSEYYRCGGSLISPCWVISATHCFIPDPKKEDYIVYLGRSRLNSNTQGEMKFEVENLILHKDYSADIAAQHNDIALLKIRSKEGRCAQPSRTIQTISLPSMYNDPQFGTSCEITGFGKENSTDYLLPEQLKMTVVKLISHRECQQPHYYGSEVTTKMLCAADPQWKTDSCSGDSGGPLVCSLQGRMTLTGIVSWGRGCALKDKPGVYTRVSHFLPWIRSHTKEENGLAL

SEQ ID NO: 755 - protein, 253 aa, Artificial Sequence
  UROKINASE-TYPE PLASMINOGEN ACTIVATOR (u-PA) protease domain V38D/L97bR/H99E/C122S/E175D/R217A/K224S
IIGGEFTTIENQPWFAAIYRRHRGGSDTYVCGGSLISPCWVISATHCFIDYPKKEDYIVYLGRSRLNSNTQGEMKFEVENLILHKDYSADTRAEHNDIALLKIRSKEGRCAQPSRTIQTISLPSMYNDPQFGTSCEITGFGKENSTDYLYPEQLKMTVVKLISHRECQQPHYYGSDVTTKMLCAADPQWKTDSCQGDSGGPLVCSLQGRMTLTGIVSWGAGCALKDSPGVYTRVSHFLPWIRSHTKEENGLAL

SEQ ID NO: 756 - protein, 253 aa, Artificial Sequence
  UROKINASE-TYPE PLASMINOGEN ACTIVATOR (u-PA) protease domain V38D/L97bR/H99E/C122S/Y172F/E175D/R217E
IIGGEFTTIENQPWFAAIYRRHRGGSDTYVCGGSLISPCWVISATHCFIDYPKKEDYIVYLGRSRLNSNTQGEMKFEVENLILHKDYSADTRAEHNDIALLKIRSKEGRCAQPSRTIQTISLPSMYNDPQFGTSCEITGFGKENSTDYLYPEQLKMTVVKLISHRECQQPHYFGSDVTTKMLCAADPQWKTDSCQGDSGGPLVCSLQGRMTLTGIVSWGEGCALKDKPGVYTRVSHFLPWIRSHTKEENGLAL

SEQ ID NO: 757 - protein, 253 aa, Artificial Sequence
  UROKINASE-TYPE PLASMINOGEN ACTIVATOR (u-PA) protease domain V38D/L97bR/H99Q/C122S/E175D/R217E/K224R
IIGGEFTTIENQPWFAAIYRRHRGGSDTYVCGGSLISPCWVISATHCFIDYPKKEDYIVYLGRSRLNSNTQGEMKFEVENLILHKDYSADTRAQHNDIALLKIRSKEGRCAQPSRTIQTISLPSMYNDPQFGTSCEITGFGKENSTDYLYPEQLKMTVVKLISHRECQQPHYYGSDVTTKMLCAADPQWKTDSCQGDSGGPLVCSLQGRMTLTGIVSWGEGCALKDRPGVYTRVSHFLPWIRSHTKEENGLAL

SEQ ID NO: 758 - protein, 253 aa, Artificial Sequence
  UROKINASE-TYPE PLASMINOGEN ACTIVATOR (u-PA) protease domain V38D/L97bR/H99E/C122S/E175D/R217A/K224Q
IIGGEFTTIENQPWFAAIYRRHRGGSDTYVCGGSLISPCWVISATHCFIDYPKKEDYIVYLGRSRLNSNTQGEMKFEVENLILHKDYSADTRAEHNDIALLKIRSKEGRCAQPSRTIQTISLPSMYNDPQFGTSCEITGFGKENSTDYLYPEQLKMTVVKLISHRECQQPHYYGSDVTTKMLCAADPQWKTDSCQGDSGGPLVCSLQGRMTLTGIVSWGAGCALKDQPGVYTRVSHFLPWIRSHTKEENGLAL

SEQ ID NO: 759 - protein, 253 aa, Artificial Sequence
  UROKINASE-TYPE PLASMINOGEN ACTIVATOR (u-PA) protease domain V38D/L97bR/H99L/C122S/E175D/R217E/K224S
IIGGEFTTIENQPWFAAIYRRHRGGSDTYVCGGSLISPCWVISATHCFIDYPKKEDYIVYLGRSRLNSNTQGEMKFEVENLILHKDYSADTRALHNDIALLKIRSKEGRCAQPSRTIQTISLPSMYNDPQFGTSCEITGFGKENSTDYLYPEQLKMTVVKLISHRECQQPHYYGSDVTTKMLCAADPQWKTDSCQGDSGGPLVCSLQGRMTLTGIVSWGEGCALKDSPGVYTRVSHFLPWIRSHTKEENGLAL

SEQ ID NO: 760 - protein, 253 aa, Artificial Sequence
  UROKINASE-TYPE PLASMINOGEN ACTIVATOR (u-PA) protease domain V38D/L97bR/H99E/C122S/E175D/R217E/K224R
IIGGEFTTIENQPWFAAIYRRHRGGSDTYVCGGSLISPCWVISATHCFIDYPKKEDYIVYLGRSRLNSNTQGEMKFEVENLILHKDYSADTRAEHNDIALLKIRSKEGRCAQPSRTIQTISLPSMYNDPQFGTSCEITGFGKENSTDYLYPEQLKMTVVKLISHRECQQPHYYGSDVTTKMLCAADPQWKTDSCQGDSGGPLVCSLQGRMTLTGIVSWGEGCALKDRPGVYTRVSHFLPWIRSHTKEENGLAL

SEQ ID NO: 761 - protein, 253 aa, Artificial Sequence
  UROKINASE-TYPE PLASMINOGEN ACTIVATOR (u-PA) protease domain V38D/L97bR/H99E/C122S/E175D/R217S/K224S
IIGGEFTTIENQPWFAAIYRRHRGGSDTYVCGGSLISPCWVISATHCFIDYPKKEDYIVYLGRSRLNSNTQGEMKFEVENLILHKDYSADTRAEHNDIALLKIRSKEGRCAQPSRTIQTISLPSMYNDPQFGTSCEITGFGKENSTDYLYPEQLKMTVVKLISHRECQQPHYYGSDVTTKMLCAADPQWKTDSCQGDSGGPLVCSLQGRMTLTGIVSWGSGCALKDSPGVYTRVSHFLPWIRSHTKEENGLAL

SEQ ID NO: 762 - protein, 253 aa, Artificial Sequence
  UROKINASE-TYPE PLASMINOGEN ACTIVATOR (u-PA) protease domain V38D/L97bR/H99V/C122S/E175D/R217E/K224N
IIGGEFTTIENQPWFAAIYRRHRGGSDTYVCGGSLISPCWVISATHCFIDYPKKEDYIVYLGRSRLNSNTQGEMKFEVENLILHKDYSADTRAVHNDIALLKIRSKEGRCAQPSRTIQTISLPSMYNDPQFGTSCEITGFGKENSTDYLYPEQLKMTVVKLISHRECQQPHYYGSDVTTKMLCAADPQWKTDSCQGDSGGPLVCSLQGRMTLTGIVSWGEGCALKDNPGVYTRVSHFLPWIRSHTKEENGLAL

SEQ ID NO: 763 - protein, 253 aa, Artificial Sequence
  UROKINASE-TYPE PLASMINOGEN ACTIVATOR (u-PA) protease domain V38D/L97bV/H99L/C122S/E175D/K224S
IIGGEFTTIENQPWFAAIYRRHRGGSDTYVCGGSLISPCWVISATHCFIDYPKKEDYIVYLGRSRLNSNTQGEMKFEVENLILHKDYSADTVALHNDIALLKIRSKEGRCAQPSRTIQTISLPSMYNDPQFGTSCEITGFGKENSTDYLYPEQLKMTVVKLISHRECQQPHYYGSDVTTKMLCAADPQWKTDSCQGDSGGPLVCSLQGRMTLTGIVSWGRGCALKDSPGVYTRVSHFLPWIRSHTKEENGLAL

SEQ ID NO: 764 - protein, 253 aa, Artificial Sequence
  UROKINASE-TYPE PLASMINOGEN ACTIVATOR (u-PA) protease domain V38D/L97bR/H99L/C122S/E175D/R217E
IIGGEFTTIENQPWFAAIYRRHRGGSDTYVCGGSLISPCWVISATHCFIDYPKKEDYIVYLGRSRLNSNTQGEMKFEVENLILHKDYSADTRALHNDIALLKIRSKEGRCAQPSRTIQTISLPSMYNDPQFGTSCEITGFGKENSTDYLYPEQLKMTVVKLISHRECQQPHYYGSDVTTKMLCAADPQWKTDSCQGDSGGPLVCSLQGRMTLTGIVSWGEGCALKDKPGVYTRVSHFLPWIRSHTKEENGLAL

SEQ ID NO: 765 - protein, 253 aa, Artificial Sequence
  UROKINASE-TYPE PLASMINOGEN ACTIVATOR (u-PA) protease domain V38D/L97bG/H99Q/C122S/E175D/R217K/K224A
IIGGEFTTIENQPWFAAIYRRHRGGSDTYVCGGSLISPCWVISATHCFIDYPKKEDYIVYLGRSRLNSNTQGEMKFEVENLILHKDYSADTGAQHNDIALLKIRSKEGRCAQPSRTIQTISLPSMYNDPQFGTSCEITGFGKENSTDYLYPEQLKMTVVKLISHRECQQPHYYGSDVTTKMLCAADPQWKTDSCQGDSGGPLVCSLQGRMTLTGIVSWGKGCALKDAPGVYTRVSHFLPWIRSHTKEENGLAL

SEQ ID NO: 766 - protein, 253 aa, Artificial Sequence
  UROKINASE-TYPE PLASMINOGEN ACTIVATOR (u-PA) protease domain V38D/L97bR/H99E/C122S/E175D/K224A
IIGGEFTTIENQPWFAAIYRRHRGGSDTYVCGGSLISPCWVISATHCFIDYPKKEDYIVYLGRSRLNSNTQGEMKFEVENLILHKDYSADTRAEHNDIALLKIRSKEGRCAQPSRTIQTISLPSMYNDPQFGTSCEITGFGKENSTDYLYPEQLKMTVVKLISHRECQQPHYYGSDVTTKMLCAADPQWKTDSCQGDSGGPLVCSLQGRMTLTGIVSWGRGCALKDAPGVYTRVSHFLPWIRSHTKEENGLAL

SEQ ID NO: 767 - protein, 253 aa, Artificial Sequence
  UROKINASE-TYPE PLASMINOGEN ACTIVATOR (u-PA) protease domain V38D/L97bR/H99E/C122S/E175D/K224S
IIGGEFTTIENQPWFAAIYRRHRGGSDTYVCGGSLISPCWVISATHCFIDYPKKEDYIVYLGRSRLNSNTQGEMKFEVENLILHKDYSADTRAEHNDIALLKIRSKEGRCAQPSRTIQTISLPSMYNDPQFGTSCEITGFGKENSTDYLYPEQLKMTVVKLISHRECQQPHYYGSDVTTKMLCAADPQWKTDSCQGDSGGPLVCSLQGRMTLTGIVSWGRGCALKDSPGVYTRVSHFLPWIRSHTKEENGLAL

SEQ ID NO: 768 - protein, 253 aa, Artificial Sequence
  UROKINASE-TYPE PLASMINOGEN ACTIVATOR (u-PA) protease domain V38D/L97bV/H99E/C122S/K224S
IIGGEFTTIENQPWFAAIYRRHRGGSDTYVCGGSLISPCWVISATHCFIDYPKKEDYIVYLGRSRLNSNTQGEMKFEVENLILHKDYSADTVAEHNDIALLKIRSKEGRCAQPSRTIQTISLPSMYNDPQFGTSCEITGFGKENSTDYLYPEQLKMTVVKLISHRECQQPHYYGSEVTTKMLCAADPQWKTDSCQGDSGGPLVCSLQGRMTLTGIVSWGRGCALKDSPGVYTRVSHFLPWIRSHTKEENGLAL

SEQ ID NO: 769 - protein, 253 aa, Artificial Sequence
  UROKINASE-TYPE PLASMINOGEN ACTIVATOR (u-PA) protease domain V38D/L97bK/H99L/C122S/R217E
IIGGEFTTIENQPWFAAIYRRHRGGSDTYVCGGSLISPCWVISATHCFIDYPKKEDYIVYLGRSRLNSNTQGEMKFEVENLILHKDYSADTKALHNDIALLKIRSKEGRCAQPSRTIQTISLPSMYNDPQFGTSCEITGFGKENSTDYLYPEQLKMTVVKLISHRECQQPHYYGSEVTTKMLCAADPQWKTDSCQGDSGGPLVCSLQGRMTLTGIVSWGEGCALKDKPGVYTRVSHFLPWIRSHTKEENGLAL

SEQ ID NO: 770 - protein, 253 aa, Artificial Sequence
  UROKINASE-TYPE PLASMINOGEN ACTIVATOR (u-PA) protease domain V38D/L97bR/H99L/C122S/E175D/R217T/K224S
IIGGEFTTIENQPWFAAIYRRHRGGSDTYVCGGSLISPCWVISATHCFIDYPKKEDYIVYLGRSRLNSNTQGEMKFEVENLILHKDYSADTRALHNDIALLKIRSKEGRCAQPSRTIQTISLPSMYNDPQFGTSCEITGFGKENSTDYLYPEQLKMTVVKLISHRECQQPHYYGSDVTTKMLCAADPQWKTDSCQGDSGGPLVCSLQGRMTLTGIVSWGTGCALKDSPGVYTRVSHFLPWIRSHTKEENGLAL

SEQ ID NO: 771 - protein, 253 aa, Artificial Sequence
  UROKINASE-TYPE PLASMINOGEN ACTIVATOR (u-PA) protease domain V38D/L97bV/H99L/C122S/K224A
IIGGEFTTIENQPWFAAIYRRHRGGSDTYVCGGSLISPCWVISATHCFIDYPKKEDYIVYLGRSRLNSNTQGEMKFEVENLILHKDYSADTVALHNDIALLKIRSKEGRCAQPSRTIQTISLPSMYNDPQFGTSCEITGFGKENSTDYLYPEQLKMTVVKLISHRECQQPHYYGSEVTTKMLCAADPQWKTDSCQGDSGGPLVCSLQGRMTLTGIVSWGRGCALKDAPGVYTRVSHFLPWIRSHTKEENGLAL

SEQ ID NO: 772 - protein, 253 aa, Artificial Sequence
  UROKINASE-TYPE PLASMINOGEN ACTIVATOR (u-PA) protease domain V38D/L97bR/H99V/C122S/E175D/R217E/K224S
IIGGEFTTIENQPWFAAIYRRHRGGSDTYVCGGSLISPCWVISATHCFIDYPKKEDYIVYLGRSRLNSNTQGEMKFEVENLILHKDYSADTRAVHNDIALLKIRSKEGRCAQPSRTIQTISLPSMYNDPQFGTSCEITGFGKENSTDYLYPEQLKMTVVKLISHRECQQPHYYGSDVTTKMLCAADPQWKTDSCQGDSGGPLVCSLQGRMTLTGIVSWGEGCALKDSPGVYTRVSHFLPWIRSHTKEENGLAL

SEQ ID NO: 773 - protein, 253 aa, Artificial Sequence
  UROKINASE-TYPE PLASMINOGEN ACTIVATOR (u-PA) protease domain V38D/L97bG/H99Q/C122S/R217Q
IIGGEFTTIENQPWFAAIYRRHRGGSDTYVCGGSLISPCWVISATHCFIDYPKKEDYIVYLGRSRLNSNTQGEMKFEVENLILHKDYSADTGAQHNDIALLKIRSKEGRCAQPSRTIQTISLPSMYNDPQFGTSCEITGFGKENSTDYLYPEQLKMTVVKLISHRECQQPHYYGSEVTTKMLCAADPQWKTDSCQGDSGGPLVCSLQGRMTLTGIVSWGQGCALKDKPGVYTRVSHFLPWIRSHTKEENGLAL

SEQ ID NO: 774 - protein, 253 aa, Artificial Sequence
  UROKINASE-TYPE PLASMINOGEN ACTIVATOR (u-PA) protease domain F30H/V38D/L97bA/H99Q/C122S/Y151L/M157T/Q192H
IIGGEFTTIENQPWHAAIYRRHRGGSDTYVCGGSLISPCWVISATHCFIDYPKKEDYIVYLGRSRLNSNTQGEMKFEVENLILHKDYSADTAAQHNDIALLKIRSKEGRCAQPSRTIQTISLPSMYNDPQFGTSCEITGFGKENSTDYLLPEQLKTTVVKLISHRECQQPHYYGSEVTTKMLCAADPQWKTDSCHGDSGGPLVCSLQGRMTLTGIVSWGRGCALKDKPGVYTRVSHFLPWIRSHTKEENGLAL

SEQ ID NO: 775 - protein, 253 aa, Artificial Sequence
  UROKINASE-TYPE PLASMINOGEN ACTIVATOR (u-PA) protease domain F30Y/V38D/Y40H/V41K/L97bA/H99Q/C122S/Y151K/M157R/Q 192E
IIGGEFTTIENQPWYAAIYRRHRGGSDTHKCGGSLISPCWVISATHCFIDYPKKEDYIVYLGRSRLNSNTQGEMKFEVENLILHKDYSADTAAQHNDIALLKIRSKEGRCAQPSRTIQTISLPSMYNDPQFGTSCEITGFGKENSTDYLKPEQLKRTVVKLISHRECQQPHYYGSEVTTKMLCAADPQWKTDSCEGDSGGPLVCSLQGRMTLTGIVSWGRGCALKDKPGVYTRVSHFLPWIRSHTKEENGLAL

SEQ ID NO: 776 - protein, 253 aa, Artificial Sequence
  UROKINASE-TYPE PLASMINOGEN ACTIVATOR (u-PA) protease domain F30Y/V38D/Y40H/V41K/L97bA/H99Q/C122S/Y151K/M157S/Q 192E
IIGGEFTTIENQPWYAAIYRRHRGGSDTHKCGGSLISPCWVISATHCFIDYPKKEDYIVYLGRSRLNSNTQGEMKFEVENLILHKDYSADTAAQHNDIALLKIRSKEGRCAQPSRTIQTISLPSMYNDPQFGTSCEITGFGKENSTDYLKPEQLKSTVVKLISHRECQQPHYYGSEVTTKMLCAADPQWKTDSCEGDSGGPLVCSLQGRMTLTGIVSWGRGCALKDKPGVYTRVSHFLPWIRSHTKEENGLAL

SEQ ID NO: 777 - protein, 253 aa, Artificial Sequence
  UROKINASE-TYPE PLASMINOGEN ACTIVATOR (u-PA) protease domain F30Y/V38D/Y40H/V41K/L97bA/H99Q/C122S/Y151K/Q192E
IIGGEFTTIENQPWYAAIYRRHRGGSDTHKCGGSLISPCWVISATHCFIDYPKKEDYIVYLGRSRLNSNTQGEMKFEVENLILHKDYSADTAAQHNDIALLKIRSKEGRCAQPSRTIQTISLPSMYNDPQFGTSCEITGFGKENSTDYLKPEQLKMTVVKLISHRECQQPHYYGSEVTTKMLCAADPQWKTDSCEGDSGGPLVCSLQGRMTLTGIVSWGRGCALKDKPGVYTRVSHFLPWIRSHTKEENGLAL

SEQ ID NO: 778 - protein, 253 aa, Artificial Sequence
  UROKINASE-TYPE PLASMINOGEN ACTIVATOR (u-PA) protease domain F30M/V38D/Y40F/V41R/L97bA/H99Q/C122S/Y151G/Q192T
IIGGEFTTIENQPWMAAIYRRHRGGSDTFRCGGSLISPCWVISATHCFIDYPKKEDYIVYLGRSRLNSNTQGEMKFEVENLILHKDYSADTAAQHNDIALLKIRSKEGRCAQPSRTIQTISLPSMYNDPQFGTSCEITGFGKENSTDYLGPEQLKMTVVKLISHRECQQPHYYGSEVTTKMLCAADPQWKTDSCTGDSGGPLVCSLQGRMTLTGIVSWGRGCALKDKPGVYTRVSHFLPWIRSHTKEENGLAL

SEQ ID NO: 779 - protein, 253 aa, Artificial Sequence
  UROKINASE-TYPE PLASMINOGEN ACTIVATOR (u-PA) protease domain F30H/V38D/V41R/L97bA/H99Q/C122S/Y151M/M157R/Q192T
IIGGEFTTIENQPWHAAIYRRHRGGSDTYRCGGSLISPCWVISATHCFIDYPKKEDYIVYLGRSRLNSNTQGEMKFEVENLILHKDYSADTAAQHNDIALLKIRSKEGRCAQPSRTIQTISLPSMYNDPQFGTSCEITGFGKENSTDYLMPEQLKRTVVKLISHRECQQPHYYGSEVTTKMLCAADPQWKTDSCTGDSGGPLVCSLQGRMTLTGIVSWGRGCALKDKPGVYTRVSHFLPWIRSHTKEENGLAL

SEQ ID NO: 780 - protein, 253 aa, Artificial Sequence
  UROKINASE-TYPE PLASMINOGEN ACTIVATOR (u-PA) protease domain F30H/V38D/Y40P/V41K/L97bA/H99Q/C122S/Y151H/M157E/Q 192A
IIGGEFTTIENQPWHAAIYRRHRGGSDTPKCGGSLISPCWVISATHCFIDYPKKEDYIVYLGRSRLNSNTQGEMKFEVENLILHKDYSADTAAQHNDIALLKIRSKEGRCAQPSRTIQTISLPSMYNDPQFGTSCEITGFGKENSTDYLHPEQLKETVVKLISHRECQQPHYYGSEVTTKMLCAADPQWKTDSCAGDSGGPLVCSLQGRMTLTGIVSWGRGCALKDKPGVYTRVSHFLPWIRSHTKEENGLAL

SEQ ID NO: 781 - protein, 253 aa, Artificial Sequence
  UROKINASE-TYPE PLASMINOGEN ACTIVATOR (u-PA) protease domain R37aH/V38E/T39S/D60aR/Y60bG/T97aE/L97bA/H99Q/C122S /Y149T/Y151S
IIGGEFTTIENQPWFAAIYRRHHGGSESYVCGGSLISPCWVISATHCFIRGPKKEDYIVYLGRSRLNSNTQGEMKFEVENLILHKDYSADEAAQHNDIALLKIRSKEGRCAQPSRTIQTISLPSMYNDPQFGTSCEITGFGKENSTDTLSPEQLKMTVVKLISHRECQQPHYYGSEVTTKMLCAADPQWKTDSCQGDSGGPLVCSLQGRMTLTGIVSWGRGCALKDKPGVYTRVSHFLPWIRSHTKEENGLAL

SEQ ID NO: 782 - protein, 253 aa, Artificial Sequence
  UROKINASE-TYPE PLASMINOGEN ACTIVATOR (u-PA) protease domain R37aH/V38E/T39A/V41R/D60aG/Y60bG/T97aI/L97bA/H99Q/ C122S/Y149V/Y151F/Q192R
IIGGEFTTIENQPWFAAIYRRHHGGSEAYRCGGSLISPCWVISATHCFIGGPKKEDYIVYLGRSRLNSNTQGEMKFEVENLILHKDYSADIAAQHNDIALLKIRSKEGRCAQPSRTIQTISLPSMYNDPQFGTSCEITGFGKENSTDVLFPEQLKMTVVKLISHRECQQPHYYGSEVTTKMLCAADPQWKTDSCRGDSGGPLVCSLQGRMTLTGIVSWGRGCALKDKPGVYTRVSHFLPWIRSHTKEENGLAL

SEQ ID NO: 783 - protein, 253 aa, Artificial Sequence
  UROKINASE-TYPE PLASMINOGEN ACTIVATOR (u-PA) protease domain R37aH/V38E/T39H/V41R/D60aT/Y60bT/T97aI/L97bA/H99Q/ C122S/Y149M/Y151N/Q192T
IIGGEFTTIENQPWFAAIYRRHHGGSEHYRCGGSLISPCWVISATHCFITTPKKEDYIVYLGRSRLNSNTQGEMKFEVENLILHKDYSADIAAQHNDIALLKIRSKEGRCAQPSRTIQTISLPSMYNDPQFGTSCEITGFGKENSTDMLNPEQLKMTVVKLISHRECQQPHYYGSEVTTKMLCAADPQWKTDSCTGDSGGPLVCSLQGRMTLTGIVSWGRGCALKDKPGVYTRVSHFLPWIRSHTKEENGLAL

SEQ ID NO: 784 - protein, 253 aa, Artificial Sequence
  UROKINASE-TYPE PLASMINOGEN ACTIVATOR (u-PA) protease domain R37aH/V38E/T39G/V41A/D60aG/Y60bE/T97aE/L97bA/H99Q/ C122S/Y149R/Y151K/Q192T
IIGGEFTTIENQPWFAAIYRRHHGGSEGYACGGSLISPCWVISATHCFIGEPKKEDYIVYLGRSRLNSNTQGEMKFEVENLILHKDYSADEAAQHNDIALLKIRSKEGRCAQPSRTIQTISLPSMYNDPQFGTSCEITGFGKENSTDRLKPEQLKMTVVKLISHRECQQPHYYGSEVTTKMLCAADPQWKTDSCTGDSGGPLVCSLQGRMTLTGIVSWGRGCALKDKPGVYTRVSHFLPWIRSHTKEENGLAL

SEQ ID NO: 785 - protein, 253 aa, Artificial Sequence
  UROKINASE-TYPE PLASMINOGEN ACTIVATOR (u-PA) protease domain V38E/T39D/V41A/D60aA/Y60bR/T97aE/L97bA/H99Q/C122S/ Y149W/Y151K/Q192T
IIGGEFTTIENQPWFAAIYRRHRGGSEDYACGGSLISPCWVISATHCFIARPKKEDYIVYLGRSRLNSNTQGEMKFEVENLILHKDYSADEAAQHNDIALLKIRSKEGRCAQPSRTIQTISLPSMYNDPQFGTSCEITGFGKENSTDWLKPEQLKMTVVKLISHRECQQPHYYGSEVTTKMLCAADPQWKTDSCTGDSGGPLVCSLQGRMTLTGIVSWGRGCALKDKPGVYTRVSHFLPWIRSHTKEENGLAL

SEQ ID NO: 786 - protein, 253 aa, Artificial Sequence
  UROKINASE-TYPE PLASMINOGEN ACTIVATOR (u-PA) protease domain V38E/T39A/V41R/D60aH/Y60bH/T97aI/L97bA/H99Q/C122S/ Y149M/Y151N/Q192T
IIGGEFTTIENQPWFAAIYRRHRGGSEAYRCGGSLISPCWVISATHCFIHHPKKEDYIVYLGRSRLNSNTQGEMKFEVENLILHKDYSADIAAQHNDIALLKIRSKEGRCAQPSRTIQTISLPSMYNDPQFGTSCEITGFGKENSTDMLNPEQLKMTVVKLISHRECQQPHYYGSEVTTKMLCAADPQWKTDSCTGDSGGPLVCSLQGRMTLTGIVSWGRGCALKDKPGVYTRVSHFLPWIRSHTKEENGLAL

SEQ ID NO: 787 - protein, 253 aa, Artificial Sequence
  UROKINASE-TYPE PLASMINOGEN ACTIVATOR (u-PA) protease domain V38E/T39F/V41R/Y60bN/T97aE/L97bA/H99Q/C122S/Y149A/ Y151G/Q192T
IIGGEFTTIENQPWFAAIYRRHRGGSEFYRCGGSLISPCWVISATHCFIDNPKKEDYIVYLGRSRLNSNTQGEMKFEVENLILHKDYSADEAAQHNDIALLKIRSKEGRCAQPSRTIQTISLPSMYNDPQFGTSCEITGFGKENSTDALGPEQLKMTVVKLISHRECQQPHYYGSEVTTKMLCAADPQWKTDSCTGDSGGPLVCSLQGRMTLTGIVSWGRGCALKDKPGVYTRVSHFLPWIRSHTKEENGLAL

SEQ ID NO: 788 - protein, 253 aa, Artificial Sequence
  UROKINASE-TYPE PLASMINOGEN ACTIVATOR (u-PA) protease domain V38E/T39D/V41A/D60aS/Y60bR/T97aE/L97bA/H99Q/C122S/ Y149W/Y151K/Q192T
IIGGEFTTIENQPWFAAIYRRHRGGSEDYACGGSLISPCWVISATHCFISRPKKEDYIVYLGRSRLNSNTQGEMKFEVENLILHKDYSADEAAQHNDIALLKIRSKEGRCAQPSRTIQTISLPSMYNDPQFGTSCEITGFGKENSTDWLKPEQLKMTVVKLISHRECQQPHYYGSEVTTKMLCAADPQWKTDSCTGDSGGPLVCSLQGRMTLTGIVSWGRGCALKDKPGVYTRVSHFLPWIRSHTKEENGLAL

SEQ ID NO: 789 - protein, 253 aa, Artificial Sequence
  UROKINASE-TYPE PLASMINOGEN ACTIVATOR (u-PA) protease domain R37aH/V38E/V41A/Y60bS/T97aE/L97bA/H99Q/C122S/Y149A /Y151M/Q192T
IIGGEFTTIENQPWFAAIYRRHHGGSETYACGGSLISPCWVISATHCFIDSPKKEDYIVYLGRSRLNSNTQGEMKFEVENLILHKDYSADEAAQHNDIALLKIRSKEGRCAQPSRTIQTISLPSMYNDPQFGTSCEITGFGKENSTDALMPEQLKMTVVKLISHRECQQPHYYGSEVTTKMLCAADPQWKTDSCTGDSGGPLVCSLQGRMTLTGIVSWGRGCALKDKPGVYTRVSHFLPWIRSHTKEENGLAL

SEQ ID NO: 790 - protein, 253 aa, Artificial Sequence
  UROKINASE-TYPE PLASMINOGEN ACTIVATOR (u-PA) protease domain R37aH/V38E/T39S/V41A/D60aG/Y60bE/T97aE/L97bA/H99Q/ C122S/Y149S/Y151H
IIGGEFTTIENQPWFAAIYRRHHGGSESYACGGSLISPCWVISATHCFIGEPKKEDYIVYLGRSRLNSNTQGEMKFEVENLILHKDYSADEAAQHNDIALLKIRSKEGRCAQPSRTIQTISLPSMYNDPQFGTSCEITGFGKENSTDSLHPEQLKMTVVKLISHRECQQPHYYGSEVTTKMLCAADPQWKTDSCQGDSGGPLVCSLQGRMTLTGIVSWGRGCALKDKPGVYTRVSHFLPWIRSHTKEENGLAL

SEQ ID NO: 791 - protein, 253 aa, Artificial Sequence
  UROKINASE-TYPE PLASMINOGEN ACTIVATOR (u-PA) protease domain R37aP/V38E/T39G/V41R/Y60bR/T97aE/L97bA/H99Q/C122S/ Y149T/Y151P/Q192T
IIGGEFTTIENQPWFAAIYRRHPGGSEGYRCGGSLISPCWVISATHCFIDRPKKEDYIVYLGRSRLNSNTQGEMKFEVENLILHKDYSADEAAQHNDIALLKIRSKEGRCAQPSRTIQTISLPSMYNDPQFGTSCEITGFGKENSTDTLPPEQLKMTVVKLISHRECQQPHYYGSEVTTKMLCAADPQWKTDSCTGDSGGPLVCSLQGRMTLTGIVSWGRGCALKDKPGVYTRVSHFLPWIRSHTKEENGLAL

SEQ ID NO: 792 - protein, 253 aa, Artificial Sequence
  UROKINASE-TYPE PLASMINOGEN ACTIVATOR (u-PA) protease domain R35Q/H37Y/R37aP/V38E/T39Y/V41R/D60aQ/Y60bP/T97aI/L 97bA/H99Q/C122S/Y149R
IIGGEFTTIENQPWFAAIYQRYPGGSEYYRCGGSLISPCWVISATHCFIQPPKKEDYIVYLGRSRLNSNTQGEMKFEVENLILHKDYSADIAAQHNDIALLKIRSKEGRCAQPSRTIQTISLPSMYNDPQFGTSCEITGFGKENSTDRLYPEQLKMTVVKLISHRECQQPHYYGSEVTTKMLCAADPQWKTDSCQGDSGGPLVCSLQGRMTLTGIVSWGRGCALKDKPGVYTRVSHFLPWIRSHTKEENGLAL

SEQ ID NO: 793 - protein, 253 aa, Artificial Sequence
  UROKINASE-TYPE PLASMINOGEN ACTIVATOR (u-PA) protease domain R35N/H37S/R37aE/V38E/T39F/V41R/D60aP/Y60bE/T97aI/L 97bA/H99Q/C122S/Y149R
IIGGEFTTIENQPWFAAIYNRSEGGSEFYRCGGSLISPCWVISATHCFIPEPKKEDYIVYLGRSRLNSNTQGEMKFEVENLILHKDYSADIAAQHNDIALLKIRSKEGRCAQPSRTIQTISLPSMYNDPQFGTSCEITGFGKENSTDRLYPEQLKMTVVKLISHRECQQPHYYGSEVTTKMLCAADPQWKTDSCQGDSGGPLVCSLQGRMTLTGIVSWGRGCALKDKPGVYTRVSHFLPWIRSHTKEENGLAL

SEQ ID NO: 794 - protein, 253 aa, Artificial Sequence
  UROKINASE-TYPE PLASMINOGEN ACTIVATOR (u-PA) protease domain R35H/H37P/R37aG/V38E/T39F/V41R/D60aP/Y60bE/T97aI/L 97bA/H99Q/C122S/Y149R
IIGGEFTTIENQPWFAAIYHRPGGGSEFYRCGGSLISPCWVISATHCFIPEPKKEDYIVYLGRSRLNSNTQGEMKFEVENLILHKDYSADIAAQHNDIALLKIRSKEGRCAQPSRTIQTISLPSMYNDPQFGTSCEITGFGKENSTDRLYPEQLKMTVVKLISHRECQQPHYYGSEVTTKMLCAADPQWKTDSCQGDSGGPLVCSLQGRMTLTGIVSWGRGCALKDKPGVYTRVSHFLPWIRSHTKEENGLAL

SEQ ID NO: 795 - protein, 253 aa, Artificial Sequence
  UROKINASE-TYPE PLASMINOGEN ACTIVATOR (u-PA) protease domain R35Q/H37G/R37aD/V38E/T39Y/V41R/D60aP/Y60bA/T97aI/L 97bA/H99Q/C122S/Y149R
IIGGEFTTIENQPWFAAIYQRGDGGSEYYRCGGSLISPCWVISATHCFIPAPKKEDYIVYLGRSRLNSNTQGEMKFEVENLILHKDYSADIAAQHNDIALLKIRSKEGRCAQPSRTIQTISLPSMYNDPQFGTSCEITGFGKENSTDRLYPEQLKMTVVKLISHRECQQPHYYGSEVTTKMLCAADPQWKTDSCQGDSGGPLVCSLQGRMTLTGIVSWGRGCALKDKPGVYTRVSHFLPWIRSHTKEENGLAL

SEQ ID NO: 796 - protein, 253 aa, Artificial Sequence
  UROKINASE-TYPE PLASMINOGEN ACTIVATOR (u-PA) protease domain R35L/H37D/R37aN/V38E/T39Y/V41R/D60aP/T97aI/L97bA/H 99Q/C122S/Y149R
IIGGEFTTIENQPWFAAIYLRDNGGSEYYRCGGSLISPCWVISATHCFIPYPKKEDYIVYLGRSRLNSNTQGEMKFEVENLILHKDYSADIAAQHNDIALLKIRSKEGRCAQPSRTIQTISLPSMYNDPQFGTSCEITGFGKENSTDRLYPEQLKMTVVKLISHRECQQPHYYGSEVTTKMLCAADPQWKTDSCQGDSGGPLVCSLQGRMTLTGIVSWGRGCALKDKPGVYTRVSHFLPWIRSHTKEENGLAL

SEQ ID NO: 797 - protein, 253 aa, Artificial Sequence
  UROKINASE-TYPE PLASMINOGEN ACTIVATOR (u-PA) protease domain R35N/H37T/R37aY/V38E/T39Y/V41R/D60aP/Y60bE/T97aI/L 97bA/H99Q/C122S/Y149R
IIGGEFTTIENQPWFAAIYNRTYGGSEYYRCGGSLISPCWVISATHCFIPEPKKEDYIVYLGRSRLNSNTQGEMKFEVENLILHKDYSADIAAQHNDIALLKIRSKEGRCAQPSRTIQTISLPSMYNDPQFGTSCEITGFGKENSTDRLYPEQLKMTVVKLISHRECQQPHYYGSEVTTKMLCAADPQWKTDSCQGDSGGPLVCSLQGRMTLTGIVSWGRGCALKDKPGVYTRVSHFLPWIRSHTKEENGLAL

SEQ ID NO: 798 - protein, 253 aa, Artificial Sequence
  UROKINASE-TYPE PLASMINOGEN ACTIVATOR (u-PA) protease domain R35Q/H37D/R37aK/V38E/T39F/V41R/D60aP/Y60bS/T97aI/L 97bA/H99Q/C122S/Y149R
IIGGEFTTIENQPWFAAIYQRDKGGSEFYRCGGSLISPCWVISATHCFIPSPKKEDYIVYLGRSRLNSNTQGEMKFEVENLILHKDYSADIAAQHNDIALLKIRSKEGRCAQPSRTIQTISLPSMYNDPQFGTSCEITGFGKENSTDRLYPEQLKMTVVKLISHRECQQPHYYGSEVTTKMLCAADPQWKTDSCQGDSGGPLVCSLQGRMTLTGIVSWGRGCALKDKPGVYTRVSHFLPWIRSHTKEENGLAL

SEQ ID NO: 799 - protein, 253 aa, Artificial Sequence
  UROKINASE-TYPE PLASMINOGEN ACTIVATOR (u-PA) protease domain R35Q/H37Y/R37aS/V38E/T39Y/V41R/D60aP/Y60bE/T97aI/L 97bA/H99Q/C122S/Y149R
IIGGEFTTIENQPWFAAIYQRYSGGSEYYRCGGSLISPCWVISATHCFIPEPKKEDYIVYLGRSRLNSNTQGEMKFEVENLILHKDYSADIAAQHNDIALLKIRSKEGRCAQPSRTIQTISLPSMYNDPQFGTSCEITGFGKENSTDRLYPEQLKMTVVKLISHRECQQPHYYGSEVTTKMLCAADPQWKTDSCQGDSGGPLVCSLQGRMTLTGIVSWGRGCALKDKPGVYTRVSHFLPWIRSHTKEENGLAL

SEQ ID NO: 800 - protein, 253 aa, Artificial Sequence
  UROKINASE-TYPE PLASMINOGEN ACTIVATOR (u-PA) protease domain R35Q/H37Y/R37aP/V38E/T39Y/V41R/D60aN/Y60bN/T97aI/L 97bA/H99Q/C122S/Y149R
IIGGEFTTIENQPWFAAIYQRYPGGSEYYRCGGSLISPCWVISATHCFINNPKKEDYIVYLGRSRLNSNTQGEMKFEVENLILHKDYSADIAAQHNDIALLKIRSKEGRCAQPSRTIQTISLPSMYNDPQFGTSCEITGFGKENSTDRLYPEQLKMTVVKLISHRECQQPHYYGSEVTTKMLCAADPQWKTDSCQGDSGGPLVCSLQGRMTLTGIVSWGRGCALKDKPGVYTRVSHFLPWIRSHTKEENGLAL

SEQ ID NO: 801 - protein, 253 aa, Artificial Sequence
  UROKINASE-TYPE PLASMINOGEN ACTIVATOR (u-PA) protease domain R35Q/H37S/R37aP/V38E/T39Y/V41R/D60aP/Y60bE/T97aI/L 97bA/H99Q/C122S/Y149R
IIGGEFTTIENQPWFAAIYQRSPGGSEYYRCGGSLISPCWVISATHCFIPEPKKEDYIVYLGRSRLNSNTQGEMKFEVENLILHKDYSADIAAQHNDIALLKIRSKEGRCAQPSRTIQTISLPSMYNDPQFGTSCEITGFGKENSTDRLYPEQLKMTVVKLISHRECQQPHYYGSEVTTKMLCAADPQWKTDSCQGDSGGPLVCSLQGRMTLTGIVSWGRGCALKDKPGVYTRVSHFLPWIRSHTKEENGLAL

SEQ ID NO: 802 - protein, 253 aa, Artificial Sequence
  UROKINASE-TYPE PLASMINOGEN ACTIVATOR (u-PA) protease domain R35Y/H37D/V38E/T39W/V41R/D60aP/Y60bE/T97aI/L97bA/H 99Q/C122S/Y149R
IIGGEFTTIENQPWFAAIYYRDRGGSEWYRCGGSLISPCWVISATHCFIPEPKKEDYIVYLGRSRLNSNTQGEMKFEVENLILHKDYSADIAAQHNDIALLKIRSKEGRCAQPSRTIQTISLPSMYNDPQFGTSCEITGFGKENSTDRLYPEQLKMTVVKLISHRECQQPHYYGSEVTTKMLCAADPQWKTDSCQGDSGGPLVCSLQGRMTLTGIVSWGRGCALKDKPGVYTRVSHFLPWIRSHTKEENGLAL

SEQ ID NO: 803 - protein, 253 aa, Artificial Sequence
  UROKINASE-TYPE PLASMINOGEN ACTIVATOR (u-PA) protease domain V38E/T39W/V41T/Y60bK/T97aE/L97bA/H99Q/C122S/Y149I/ Y151G/Q192T
IIGGEFTTIENQPWFAAIYRRHRGGSEWYTCGGSLISPCWVISATHCFIDKPKKEDYIVYLGRSRLNSNTQGEMKFEVENLILHKDYSADEAAQHNDIALLKIRSKEGRCAQPSRTIQTISLPSMYNDPQFGTSCEITGFGKENSTDILGPEQLKMTVVKLISHRECQQPHYYGSEVTTKMLCAADPQWKTDSCTGDSGGPLVCSLQGRMTLTGIVSWGRGCALKDKPGVYTRVSHFLPWIRSHTKEENGLAL

SEQ ID NO: 804 - protein, 253 aa, Artificial Sequence
  UROKINASE-TYPE PLASMINOGEN ACTIVATOR (u-PA) protease domain V38E/T39W/V41T/D60aP/Y60bQ/T97aE/L97bA/H99Q/C122S/ Y149V/Y151G/Q192T
IIGGEFTTIENQPWFAAIYRRHRGGSEWYTCGGSLISPCWVISATHCFIPQPKKEDYIVYLGRSRLNSNTQGEMKFEVENLILHKDYSADEAAQHNDIALLKIRSKEGRCAQPSRTIQTISLPSMYNDPQFGTSCEITGFGKENSTDVLGPEQLKMTVVKLISHRECQQPHYYGSEVTTKMLCAADPQWKTDSCTGDSGGPLVCSLQGRMTLTGIVSWGRGCALKDKPGVYTRVSHFLPWIRSHTKEENGLAL

SEQ ID NO: 805 - protein, 253 aa, Artificial Sequence
  UROKINASE-TYPE PLASMINOGEN ACTIVATOR (u-PA) protease domain V38E/T39W/V41T/D60aP/Y60bW/T97aI/L97bA/H99Q/C122S/ Y149L/Y151G/Q192T
IIGGEFTTIENQPWFAAIYRRHRGGSEWYTCGGSLISPCWVISATHCFIPWPKKEDYIVYLGRSRLNSNTQGEMKFEVENLILHKDYSADIAAQHNDIALLKIRSKEGRCAQPSRTIQTISLPSMYNDPQFGTSCEITGFGKENSTDLLGPEQLKMTVVKLISHRECQQPHYYGSEVTTKMLCAADPQWKTDSCTGDSGGPLVCSLQGRMTLTGIVSWGRGCALKDKPGVYTRVSHFLPWIRSHTKEENGLAL

SEQ ID NO: 806 - protein, 253 aa, Artificial Sequence
  UROKINASE-TYPE PLASMINOGEN ACTIVATOR (u-PA) protease domain V38E/T39W/V41Q/Y60bE/T97aE/L97bA/H99Q/C122S/Y149I/ Y151G/Q192T
IIGGEFTTIENQPWFAAIYRRHRGGSEWYQCGGSLISPCWVISATHCFIDEPKKEDYIVYLGRSRLNSNTQGEMKFEVENLILHKDYSADEAAQHNDIALLKIRSKEGRCAQPSRTIQTISLPSMYNDPQFGTSCEITGFGKENSTDILGPEQLKMTVVKLISHRECQQPHYYGSEVTTKMLCAADPQWKTDSCTGDSGGPLVCSLQGRMTLTGIVSWGRGCALKDKPGVYTRVSHFLPWIRSHTKEENGLAL

SEQ ID NO: 807 - protein, 253 aa, Artificial Sequence
  UROKINASE-TYPE PLASMINOGEN ACTIVATOR (u-PA) protease domain V38E/T39L/V41R/D60aP/Y60bD/T97aI/L97bA/H99Q/C122S/ Y149V/Y151L/Q192T
IIGGEFTTIENQPWFAAIYRRHRGGSELYRCGGSLISPCWVISATHCFIPDPKKEDYIVYLGRSRLNSNTQGEMKFEVENLILHKDYSADIAAQHNDIALLKIRSKEGRCAQPSRTIQTISLPSMYNDPQFGTSCEITGFGKENSTDVLLPEQLKMTVVKLISHRECQQPHYYGSEVTTKMLCAADPQWKTDSCTGDSGGPLVCSLQGRMTLTGIVSWGRGCALKDKPGVYTRVSHFLPWIRSHTKEENGLAL

SEQ ID NO: 808 - protein, 253 aa, Artificial Sequence
  UROKINASE-TYPE PLASMINOGEN ACTIVATOR (u-PA) protease domain V38D/L97bR/H99M/C122S/E175D/R217E
IIGGEFTTIENQPWFAAIYRRHRGGSDTYVCGGSLISPCWVISATHCFIDYPKKEDYIVYLGRSRLNSNTQGEMKFEVENLILHKDYSADTRAMHNDIALLKIRSKEGRCAQPSRTIQTISLPSMYNDPQFGTSCEITGFGKENSTDYLYPEQLKMTVVKLISHRECQQPHYYGSDVTTKMLCAADPQWKTDSCQGDSGGPLVCSLQGRMTLTGIVSWGEGCALKDKPGVYTRVSHFLPWIRSHTKEENGLAL

SEQ ID NO: 809 - protein, 253 aa, Artificial Sequence
  UROKINASE-TYPE PLASMINOGEN ACTIVATOR (u-PA) protease domain V38D/L97bR/H99M/C122S/E175D/R217E/K224R
IIGGEFTTIENQPWFAAIYRRHRGGSDTYVCGGSLISPCWVISATHCFIDYPKKEDYIVYLGRSRLNSNTQGEMKFEVENLILHKDYSADTRAMHNDIALLKIRSKEGRCAQPSRTIQTISLPSMYNDPQFGTSCEITGFGKENSTDYLYPEQLKMTVVKLISHRECQQPHYYGSDVTTKMLCAADPQWKTDSCQGDSGGPLVCSLQGRMTLTGIVSWGEGCALKDRPGVYTRVSHFLPWIRSHTKEENGLAL

SEQ ID NO: 810 - protein, 253 aa, Artificial Sequence
  UROKINASE-TYPE PLASMINOGEN ACTIVATOR (u-PA) protease domain V38D/L97bR/C122S/E175D/R217E/K224R
IIGGEFTTIENQPWFAAIYRRHRGGSDTYVCGGSLISPCWVISATHCFIDYPKKEDYIVYLGRSRLNSNTQGEMKFEVENLILHKDYSADTRAHHNDIALLKIRSKEGRCAQPSRTIQTISLPSMYNDPQFGTSCEITGFGKENSTDYLYPEQLKMTVVKLISHRECQQPHYYGSDVTTKMLCAADPQWKTDSCQGDSGGPLVCSLQGRMTLTGIVSWGEGCALKDRPGVYTRVSHFLPWIRSHTKEENGLAL

SEQ ID NO: 811 - protein, 253 aa, Artificial Sequence
  UROKINASE-TYPE PLASMINOGEN ACTIVATOR (u-PA) protease domain V38D/L97bR/H99L/C122S/E175D/R217E/K224R
IIGGEFTTIENQPWFAAIYRRHRGGSDTYVCGGSLISPCWVISATHCFIDYPKKEDYIVYLGRSRLNSNTQGEMKFEVENLILHKDYSADTRALHNDIALLKIRSKEGRCAQPSRTIQTISLPSMYNDPQFGTSCEITGFGKENSTDYLYPEQLKMTVVKLISHRECQQPHYYGSDVTTKMLCAADPQWKTDSCQGDSGGPLVCSLQGRMTLTGIVSWGEGCALKDRPGVYTRVSHFLPWIRSHTKEENGLAL

SEQ ID NO: 812 - protein, 253 aa, Artificial Sequence
  UROKINASE-TYPE PLASMINOGEN ACTIVATOR (u-PA) protease domain V38D/L97bT/H99L/C122S/E175D/R217K
IIGGEFTTIENQPWFAAIYRRHRGGSDTYVCGGSLISPCWVISATHCFIDYPKKEDYIVYLGRSRLNSNTQGEMKFEVENLILHKDYSADTTALHNDIALLKIRSKEGRCAQPSRTIQTISLPSMYNDPQFGTSCEITGFGKENSTDYLYPEQLKMTVVKLISHRECQQPHYYGSDVTTKMLCAADPQWKTDSCQGDSGGPLVCSLQGRMTLTGIVSWGKGCALKDKPGVYTRVSHFLPWIRSHTKEENGLAL

SEQ ID NO: 813 - protein, 253 aa, Artificial Sequence
  UROKINASE-TYPE PLASMINOGEN ACTIVATOR (u-PA) protease domain V38D/L97bR/H99L/C122S/E175D/K224A
IIGGEFTTIENQPWFAAIYRRHRGGSDTYVCGGSLISPCWVISATHCFIDYPKKEDYIVYLGRSRLNSNTQGEMKFEVENLILHKDYSADTRALHNDIALLKIRSKEGRCAQPSRTIQTISLPSMYNDPQFGTSCEITGFGKENSTDYLYPEQLKMTVVKLISHRECQQPHYYGSDVTTKMLCAADPQWKTDSCQGDSGGPLVCSLQGRMTLTGIVSWGRGCALKDAPGVYTRVSHFLPWIRSHTKEENGLAL

SEQ ID NO: 814 - protein, 253 aa, Artificial Sequence
  UROKINASE-TYPE PLASMINOGEN ACTIVATOR (u-PA) protease domain V38D/L97bM/H99S/C122S/K224S
IIGGEFTTIENQPWFAAIYRRHRGGSDTYVCGGSLISPCWVISATHCFIDYPKKEDYIVYLGRSRLNSNTQGEMKFEVENLILHKDYSADTMASHNDIALLKIRSKEGRCAQPSRTIQTISLPSMYNDPQFGTSCEITGFGKENSTDYLYPEQLKMTVVKLISHRECQQPHYYGSEVTTKMLCAADPQWKTDSCQGDSGGPLVCSLQGRMTLTGIVSWGRGCALKDSPGVYTRVSHFLPWIRSHTKEENGLAL

SEQ ID NO: 815 - protein, 253 aa, Artificial Sequence
  UROKINASE-TYPE PLASMINOGEN ACTIVATOR (u-PA) protease domain V38D/L97bK/H99L/C122S/E175D/K224A
IIGGEFTTIENQPWFAAIYRRHRGGSDTYVCGGSLISPCWVISATHCFIDYPKKEDYIVYLGRSRLNSNTQGEMKFEVENLILHKDYSADTKALHNDIALLKIRSKEGRCAQPSRTIQTISLPSMYNDPQFGTSCEITGFGKENSTDYLYPEQLKMTVVKLISHRECQQPHYYGSDVTTKMLCAADPQWKTDSCQGDSGGPLVCSLQGRMTLTGIVSWGRGCALKDAPGVYTRVSHFLPWIRSHTKEENGLAL

SEQ ID NO: 816 - protein, 253 aa, Artificial Sequence
  UROKINASE-TYPE PLASMINOGEN ACTIVATOR (u-PA) protease domain V38D/L97bR/H99V/C122S/E175D/R217E/K224R
IIGGEFTTIENQPWFAAIYRRHRGGSDTYVCGGSLISPCWVISATHCFIDYPKKEDYIVYLGRSRLNSNTQGEMKFEVENLILHKDYSADTRAVHNDIALLKIRSKEGRCAQPSRTIQTISLPSMYNDPQFGTSCEITGFGKENSTDYLYPEQLKMTVVKLISHRECQQPHYYGSDVTTKMLCAADPQWKTDSCQGDSGGPLVCSLQGRMTLTGIVSWGEGCALKDRPGVYTRVSHFLPWIRSHTKEENGLAL

SEQ ID NO: 817 - protein, 253 aa, Artificial Sequence
  UROKINASE-TYPE PLASMINOGEN ACTIVATOR (u-PA) protease domain V38D/L97bT/H99E/C122S/E175D/K224S
IIGGEFTTIENQPWFAAIYRRHRGGSDTYVCGGSLISPCWVISATHCFIDYPKKEDYIVYLGRSRLNSNTQGEMKFEVENLILHKDYSADTTAEHNDIALLKIRSKEGRCAQPSRTIQTISLPSMYNDPQFGTSCEITGFGKENSTDYLYPEQLKMTVVKLISHRECQQPHYYGSDVTTKMLCAADPQWKTDSCQGDSGGPLVCSLQGRMTLTGIVSWGRGCALKDSPGVYTRVSHFLPWIRSHTKEENGLAL

SEQ ID NO: 818 - protein, 253 aa, Artificial Sequence
  UROKINASE-TYPE PLASMINOGEN ACTIVATOR (u-PA) protease domain V38D/V41R/Y60bK/T97aS/L97bR/H99E/C122S/Y151L/E175D /Q192T/R217E/K224R
IIGGEFTTIENQPWFAAIYRRHRGGSDTYRCGGSLISPCWVISATHCFIDKPKKEDYIVYLGRSRLNSNTQGEMKFEVENLILHKDYSADSRAEHNDIALLKIRSKEGRCAQPSRTIQTISLPSMYNDPQFGTSCEITGFGKENSTDYLLPEQLKMTVVKLISHRECQQPHYYGSDVTTKMLCAADPQWKTDSCTGDSGGPLVCSLQGRMTLTGIVSWGEGCALKDRPGVYTRVSHFLPWIRSHTKEENGLAL

SEQ ID NO: 819 - protein, 253 aa, Artificial Sequence
  UROKINASE-TYPE PLASMINOGEN ACTIVATOR (u-PA) protease domain V38D/V41Q/D60aK/Y60bD/T97aA/L97bR/H99E/C122S/Y151L /E175D/Q192Y/R217E/K224R
IIGGEFTTIENQPWFAAIYRRHRGGSDTYQCGGSLISPCWVISATHCFIKDPKKEDYIVYLGRSRLNSNTQGEMKFEVENLILHKDYSADARAEHNDIALLKIRSKEGRCAQPSRTIQTISLPSMYNDPQFGTSCEITGFGKENSTDYLLPEQLKMTVVKLISHRECQQPHYYGSDVTTKMLCAADPQWKTDSCYGDSGGPLVCSLQGRMTLTGIVSWGEGCALKDRPGVYTRVSHFLPWIRSHTKEENGLAL

SEQ ID NO: 820 - protein, 253 aa, Artificial Sequence
  UROKINASE-TYPE PLASMINOGEN ACTIVATOR (u-PA) protease domain V38D/V41Q/D60aP/Y60bS/T97aS/L97bR/H99E/C122S/Y151L /E175D/Q192Y/R217E/K224R
IIGGEFTTIENQPWFAAIYRRHRGGSDTYQCGGSLISPCWVISATHCFIPSPKKEDYIVYLGRSRLNSNTQGEMKFEVENLILHKDYSADSRAEHNDIALLKIRSKEGRCAQPSRTIQTISLPSMYNDPQFGTSCEITGFGKENSTDYLLPEQLKMTVVKLISHRECQQPHYYGSDVTTKMLCAADPQWKTDSCYGDSGGPLVCSLQGRMTLTGIVSWGEGCALKDRPGVYTRVSHFLPWIRSHTKEENGLAL

SEQ ID NO: 821 - protein, 253 aa, Artificial Sequence
  UROKINASE-TYPE PLASMINOGEN ACTIVATOR (u-PA) protease domain V38D/V41R/Y60bR/T97aW/L97bR/H99E/C122S/E175D/R217E /K224R
IIGGEFTTIENQPWFAAIYRRHRGGSDTYRCGGSLISPCWVISATHCFIDRPKKEDYIVYLGRSRLNSNTQGEMKFEVENLILHKDYSADWRAEHNDIALLKIRSKEGRCAQPSRTIQTISLPSMYNDPQFGTSCEITGFGKENSTDYLYPEQLKMTVVKLISHRECQQPHYYGSDVTTKMLCAADPQWKTDSCQGDSGGPLVCSLQGRMTLTGIVSWGEGCALKDRPGVYTRVSHFLPWIRSHTKEENGLAL

SEQ ID NO: 822 - protein, 253 aa, Artificial Sequence
  UROKINASE-TYPE PLASMINOGEN ACTIVATOR (u-PA) protease domain V38D/V41R/Y60bS/T97aI/L97bR/H99E/C122S/Y151L/E175D /Q192F/R217E/K224R
IIGGEFTTIENQPWFAAIYRRHRGGSDTYRCGGSLISPCWVISATHCFIDSPKKEDYIVYLGRSRLNSNTQGEMKFEVENLILHKDYSADIRAEHNDIALLKIRSKEGRCAQPSRTIQTISLPSMYNDPQFGTSCEITGFGKENSTDYLLPEQLKMTVVKLISHRECQQPHYYGSDVTTKMLCAADPQWKTDSCFGDSGGPLVCSLQGRMTLTGIVSWGEGCALKDRPGVYTRVSHFLPWIRSHTKEENGLAL

SEQ ID NO: 823 - protein, 253 aa, Artificial Sequence
  UROKINASE-TYPE PLASMINOGEN ACTIVATOR (u-PA) protease domain V38D/V41L/Y60bP/T97aM/L97bR/H99E/C122S/Y151L/E175D /R217E/K224R
IIGGEFTTIENQPWFAAIYRRHRGGSDTYLCGGSLISPCWVISATHCFIDPPKKEDYIVYLGRSRLNSNTQGEMKFEVENLILHKDYSADMRAEHNDIALLKIRSKEGRCAQPSRTIQTISLPSMYNDPQFGTSCEITGFGKENSTDYLLPEQLKMTVVKLISHRECQQPHYYGSDVTTKMLCAADPQWKTDSCQGDSGGPLVCSLQGRMTLTGIVSWGEGCALKDRPGVYTRVSHFLPWIRSHTKEENGLAL

SEQ ID NO: 824 - protein, 253 aa, Artificial Sequence
  UROKINASE-TYPE PLASMINOGEN ACTIVATOR (u-PA) protease domain V38D/V41Q/D60aH/Y60bS/T97aW/L97bR/H99E/C122S/Y151L /E175D/R217E/K224R
IIGGEFTTIENQPWFAAIYRRHRGGSDTYQCGGSLISPCWVISATHCFIHSPKKEDYIVYLGRSRLNSNTQGEMKFEVENLILHKDYSADWRAEHNDIALLKIRSKEGRCAQPSRTIQTISLPSMYNDPQFGTSCEITGFGKENSTDYLLPEQLKMTVVKLISHRECQQPHYYGSDVTTKMLCAADPQWKTDSCQGDSGGPLVCSLQGRMTLTGIVSWGEGCALKDRPGVYTRVSHFLPWIRSHTKEENGLAL

SEQ ID NO: 825 - protein, 253 aa, Artificial Sequence
  UROKINASE-TYPE PLASMINOGEN ACTIVATOR (u-PA) protease domain V38D/V41K/D60aN/Y60bN/L97bR/H99E/C122S/Y151L/E175D /Q192H/R217E/K224R
IIGGEFTTIENQPWFAAIYRRHRGGSDTYKCGGSLISPCWVISATHCFINNPKKEDYIVYLGRSRLNSNTQGEMKFEVENLILHKDYSADTRAEHNDIALLKIRSKEGRCAQPSRTIQTISLPSMYNDPQFGTSCEITGFGKENSTDYLLPEQLKMTVVKLISHRECQQPHYYGSDVTTKMLCAADPQWKTDSCHGDSGGPLVCSLQGRMTLTGIVSWGEGCALKDRPGVYTRVSHFLPWIRSHTKEENGLAL

SEQ ID NO: 826 - protein, 253 aa, Artificial Sequence
  UROKINASE-TYPE PLASMINOGEN ACTIVATOR (u-PA) protease domain V38D/V41Q/Y60bR/T97aW/L97bR/H99E/C122S/Y151L/E175D /Q192T/R217E/K224R
IIGGEFTTIENQPWFAAIYRRHRGGSDTYQCGGSLISPCWVISATHCFIDRPKKEDYIVYLGRSRLNSNTQGEMKFEVENLILHKDYSADWRAEHNDIALLKIRSKEGRCAQPSRTIQTISLPSMYNDPQFGTSCEITGFGKENSTDYLLPEQLKMTVVKLISHRECQQPHYYGSDVTTKMLCAADPQWKTDSCTGDSGGPLVCSLQGRMTLTGIVSWGEGCALKDRPGVYTRVSHFLPWIRSHTKEENGLAL

SEQ ID NO: 827 - protein, 253 aa, Artificial Sequence
  UROKINASE-TYPE PLASMINOGEN ACTIVATOR (u-PA) protease domain V38D/V41L/L97bG/H99Q/C122S/Y151L/R217Q
IIGGEFTTIENQPWFAAIYRRHRGGSDTYLCGGSLISPCWVISATHCFIDYPKKEDYIVYLGRSRLNSNTQGEMKFEVENLILHKDYSADTGAQHNDIALLKIRSKEGRCAQPSRTIQTISLPSMYNDPQFGTSCEITGFGKENSTDYLLPEQLKMTVVKLISHRECQQPHYYGSEVTTKMLCAADPQWKTDSCQGDSGGPLVCSLQGRMTLTGIVSWGQGCALKDKPGVYTRVSHFLPWIRSHTKEENGLAL

SEQ ID NO: 828 - protein, 253 aa, Artificial Sequence
  UROKINASE-TYPE PLASMINOGEN ACTIVATOR (u-PA) protease domain V38D/V41Q/L97bG/H99Q/C122S/Y151L/Q192S/R217A
IIGGEFTTIENQPWFAAIYRRHRGGSDTYQCGGSLISPCWVISATHCFIDYPKKEDYIVYLGRSRLNSNTQGEMKFEVENLILHKDYSADTGAQHNDIALLKIRSKEGRCAQPSRTIQTISLPSMYNDPQFGTSCEITGFGKENSTDYLLPEQLKMTVVKLISHRECQQPHYYGSEVTTKMLCAADPQWKTDSCSGDSGGPLVCSLQGRMTLTGIVSWGAGCALKDKPGVYTRVSHFLPWIRSHTKEENGLAL

SEQ ID NO: 829 - protein, 253 aa, Artificial Sequence
  UROKINASE-TYPE PLASMINOGEN ACTIVATOR (u-PA) protease domain R37aS/V38D/V41Q/L97bG/H99Q/C122S/Y151L/R217T
IIGGEFTTIENQPWFAAIYRRHSGGSDTYQCGGSLISPCWVISATHCFIDYPKKEDYIVYLGRSRLNSNTQGEMKFEVENLILHKDYSADTGAQHNDIALLKIRSKEGRCAQPSRTIQTISLPSMYNDPQFGTSCEITGFGKENSTDYLLPEQLKMTVVKLISHRECQQPHYYGSEVTTKMLCAADPQWKTDSCQGDSGGPLVCSLQGRMTLTGIVSWGTGCALKDKPGVYTRVSHFLPWIRSHTKEENGLAL

SEQ ID NO: 830 - protein, 253 aa, Artificial Sequence
  UROKINASE-TYPE PLASMINOGEN ACTIVATOR (u-PA) protease domain V38D/V41R/L97bG/H99Q/C122S/Y151L/R217A
IIGGEFTTIENQPWFAAIYRRHRGGSDTYRCGGSLISPCWVISATHCFIDYPKKEDYIVYLGRSRLNSNTQGEMKFEVENLILHKDYSADTGAQHNDIALLKIRSKEGRCAQPSRTIQTISLPSMYNDPQFGTSCEITGFGKENSTDYLLPEQLKMTVVKLISHRECQQPHYYGSEVTTKMLCAADPQWKTDSCQGDSGGPLVCSLQGRMTLTGIVSWGAGCALKDKPGVYTRVSHFLPWIRSHTKEENGLAL

SEQ ID NO: 831 - protein, 253 aa, Artificial Sequence
  UROKINASE-TYPE PLASMINOGEN ACTIVATOR (u-PA) protease domain V38D/V41R/L97bG/H99Q/C122S/Y151L/R217E
IIGGEFTTIENQPWFAAIYRRHRGGSDTYRCGGSLISPCWVISATHCFIDYPKKEDYIVYLGRSRLNSNTQGEMKFEVENLILHKDYSADTGAQHNDIALLKIRSKEGRCAQPSRTIQTISLPSMYNDPQFGTSCEITGFGKENSTDYLLPEQLKMTVVKLISHRECQQPHYYGSEVTTKMLCAADPQWKTDSCQGDSGGPLVCSLQGRMTLTGIVSWGEGCALKDKPGVYTRVSHFLPWIRSHTKEENGLAL

SEQ ID NO: 832 - protein, 253 aa, Artificial Sequence
  UROKINASE-TYPE PLASMINOGEN ACTIVATOR (u-PA) protease domain R35Q/V38D/V41R/T97aS/L97bA/H99Q/C122S/Y151L
IIGGEFTTIENQPWFAAIYQRHRGGSDTYRCGGSLISPCWVISATHCFIDYPKKEDYIVYLGRSRLNSNTQGEMKFEVENLILHKDYSADSAAQHNDIALLKIRSKEGRCAQPSRTIQTISLPSMYNDPQFGTSCEITGFGKENSTDYLLPEQLKMTVVKLISHRECQQPHYYGSEVTTKMLCAADPQWKTDSCQGDSGGPLVCSLQGRMTLTGIVSWGRGCALKDKPGVYTRVSHFLPWIRSHTKEENGLAL

SEQ ID NO: 833 - protein, 253 aa, Artificial Sequence
  UROKINASE-TYPE PLASMINOGEN ACTIVATOR (u-PA) protease domain V38D/V41Q/L97bG/H99Q/C122S/Y151L/R217T
IIGGEFTTIENQPWFAAIYRRHRGGSDTYQCGGSLISPCWVISATHCFIDYPKKEDYIVYLGRSRLNSNTQGEMKFEVENLILHKDYSADTGAQHNDIALLKIRSKEGRCAQPSRTIQTISLPSMYNDPQFGTSCEITGFGKENSTDYLLPEQLKMTVVKLISHRECQQPHYYGSEVTTKMLCAADPQWKTDSCQGDSGGPLVCSLQGRMTLTGIVSWGTGCALKDKPGVYTRVSHFLPWIRSHTKEENGLAL

SEQ ID NO: 834 - protein, 253 aa, Artificial Sequence
  UROKINASE-TYPE PLASMINOGEN ACTIVATOR (u-PA) protease domain R35Q/V38D/V41R/L97bG/H99Q/C122S/Y151L
IIGGEFTTIENQPWFAAIYQRHRGGSDTYRCGGSLISPCWVISATHCFIDYPKKEDYIVYLGRSRLNSNTQGEMKFEVENLILHKDYSADTGAQHNDIALLKIRSKEGRCAQPSRTIQTISLPSMYNDPQFGTSCEITGFGKENSTDYLLPEQLKMTVVKLISHRECQQPHYYGSEVTTKMLCAADPQWKTDSCQGDSGGPLVCSLQGRMTLTGIVSWGRGCALKDKPGVYTRVSHFLPWIRSHTKEENGLAL

SEQ ID NO: 835 - protein, 253 aa, Artificial Sequence
  UROKINASE-TYPE PLASMINOGEN ACTIVATOR (u-PA) protease domain R35S/V38D/V41R/L97bA/H99Q/C122S/Y151L
IIGGEFTTIENQPWFAAIYSRHRGGSDTYRCGGSLISPCWVISATHCFIDYPKKEDYIVYLGRSRLNSNTQGEMKFEVENLILHKDYSADTAAQHNDIALLKIRSKEGRCAQPSRTIQTISLPSMYNDPQFGTSCEITGFGKENSTDYLLPEQLKMTVVKLISHRECQQPHYYGSEVTTKMLCAADPQWKTDSCQGDSGGPLVCSLQGRMTLTGIVSWGRGCALKDKPGVYTRVSHFLPWIRSHTKEENGLAL

SEQ ID NO: 836 - protein, 253 aa, Artificial Sequence
  UROKINASE-TYPE PLASMINOGEN ACTIVATOR (u-PA) protease domain R35S/V38D/V41L/L97bG/H99Q/C122S/Y151L/R217Q
IIGGEFTTIENQPWFAAIYSRHRGGSDTYLCGGSLISPCWVISATHCFIDYPKKEDYIVYLGRSRLNSNTQGEMKFEVENLILHKDYSADTGAQHNDIALLKIRSKEGRCAQPSRTIQTISLPSMYNDPQFGTSCEITGFGKENSTDYLLPEQLKMTVVKLISHRECQQPHYYGSEVTTKMLCAADPQWKTDSCQGDSGGPLVCSLQGRMTLTGIVSWGQGCALKDKPGVYTRVSHFLPWIRSHTKEENGLAL

SEQ ID NO: 837 - protein, 253 aa, Artificial Sequence
  UROKINASE-TYPE PLASMINOGEN ACTIVATOR (u-PA) protease domain V38D/V41R/L97bG/H99Q/C122S/Y151L/Q192S/R217A
IIGGEFTTIENQPWFAAIYRRHRGGSDTYRCGGSLISPCWVISATHCFIDYPKKEDYIVYLGRSRLNSNTQGEMKFEVENLILHKDYSADTGAQHNDIALLKIRSKEGRCAQPSRTIQTISLPSMYNDPQFGTSCEITGFGKENSTDYLLPEQLKMTVVKLISHRECQQPHYYGSEVTTKMLCAADPQWKTDSCSGDSGGPLVCSLQGRMTLTGIVSWGAGCALKDKPGVYTRVSHFLPWIRSHTKEENGLAL

SEQ ID NO: 838 - protein, 253 aa, Artificial Sequence
  UROKINASE-TYPE PLASMINOGEN ACTIVATOR (u-PA) protease domain R35S/V38D/Y40Q/V41R/Y60bS/L97bG/H99Q/C122S
IIGGEFTTIENQPWFAAIYSRHRGGSDTQRCGGSLISPCWVISATHCFIDSPKKEDYIVYLGRSRLNSNTQGEMKFEVENLILHKDYSADTGAQHNDIALLKIRSKEGRCAQPSRTIQTISLPSMYNDPQFGTSCEITGFGKENSTDYLYPEQLKMTVVKLISHRECQQPHYYGSEVTTKMLCAADPQWKTDSCQGDSGGPLVCSLQGRMTLTGIVSWGRGCALKDKPGVYTRVSHFLPWIRSHTKEENGLAL

SEQ ID NO: 839 - protein, 253 aa, Artificial Sequence
  UROKINASE-TYPE PLASMINOGEN ACTIVATOR (u-PA) protease domain R35K/V38D/Y40H/V41R/Y60bS/L97bG/H99Q/C122S
IIGGEFTTIENQPWFAAIYKRHRGGSDTHRCGGSLISPCWVISATHCFIDSPKKEDYIVYLGRSRLNSNTQGEMKFEVENLILHKDYSADTGAQHNDIALLKIRSKEGRCAQPSRTIQTISLPSMYNDPQFGTSCEITGFGKENSTDYLYPEQLKMTVVKLISHRECQQPHYYGSEVTTKMLCAADPQWKTDSCQGDSGGPLVCSLQGRMTLTGIVSWGRGCALKDKPGVYTRVSHFLPWIRSHTKEENGLAL

SEQ ID NO: 840 - protein, 253 aa, Artificial Sequence
  UROKINASE-TYPE PLASMINOGEN ACTIVATOR (u-PA) protease domain R35Q/V38D/Y40L/V41L/Y60bP/L97bG/H99Q/C122S
IIGGEFTTIENQPWFAAIYQRHRGGSDTLLCGGSLISPCWVISATHCFIDPPKKEDYIVYLGRSRLNSNTQGEMKFEVENLILHKDYSADTGAQHNDIALLKIRSKEGRCAQPSRTIQTISLPSMYNDPQFGTSCEITGFGKENSTDYLYPEQLKMTVVKLISHRECQQPHYYGSEVTTKMLCAADPQWKTDSCQGDSGGPLVCSLQGRMTLTGIVSWGRGCALKDKPGVYTRVSHFLPWIRSHTKEENGLAL

SEQ ID NO: 841 - protein, 253 aa, Artificial Sequence
  UROKINASE-TYPE PLASMINOGEN ACTIVATOR (u-PA) protease domain R35S/V38D/Y40H/V41L/Y60bD/L97bG/H99Q/C122S
IIGGEFTTIENQPWFAAIYSRHRGGSDTHLCGGSLISPCWVISATHCFIDDPKKEDYIVYLGRSRLNSNTQGEMKFEVENLILHKDYSADTGAQHNDIALLKIRSKEGRCAQPSRTIQTISLPSMYNDPQFGTSCEITGFGKENSTDYLYPEQLKMTVVKLISHRECQQPHYYGSEVTTKMLCAADPQWKTDSCQGDSGGPLVCSLQGRMTLTGIVSWGRGCALKDKPGVYTRVSHFLPWIRSHTKEENGLAL

SEQ ID NO: 842 - protein, 253 aa, Artificial Sequence
  UROKINASE-TYPE PLASMINOGEN ACTIVATOR (u-PA) protease domain V38D/V41R/Y60bN/T97aL/L97bR/H99E/C122S/Y151L/E175D /Q192T/R217E/K224R
IIGGEFTTIENQPWFAAIYRRHRGGSDTYRCGGSLISPCWVISATHCFIDNPKKEDYIVYLGRSRLNSNTQGEMKFEVENLILHKDYSADLRAEHNDIALLKIRSKEGRCAQPSRTIQTISLPSMYNDPQFGTSCEITGFGKENSTDYLLPEQLKMTVVKLISHRECQQPHYYGSDVTTKMLCAADPQWKTDSCTGDSGGPLVCSLQGRMTLTGIVSWGEGCALKDRPGVYTRVSHFLPWIRSHTKEENGLAL

SEQ ID NO: 843 - protein, 253 aa, Artificial Sequence
  UROKINASE-TYPE PLASMINOGEN ACTIVATOR (u-PA) protease domain V38D/V41Q/Y60bR/T97aF/L97bR/H99Q/C122S/Y151L/E175D /Q192H/R217E/K224R
IIGGEFTTIENQPWFAAIYRRHRGGSDTYQCGGSLISPCWVISATHCFIDRPKKEDYIVYLGRSRLNSNTQGEMKFEVENLILHKDYSADFRAQHNDIALLKIRSKEGRCAQPSRTIQTISLPSMYNDPQFGTSCEITGFGKENSTDYLLPEQLKMTVVKLISHRECQQPHYYGSDVTTKMLCAADPQWKTDSCHGDSGGPLVCSLQGRMTLTGIVSWGEGCALKDRPGVYTRVSHFLPWIRSHTKEENGLAL

SEQ ID NO: 844 - protein, 253 aa, Artificial Sequence
  UROKINASE-TYPE PLASMINOGEN ACTIVATOR (u-PA) protease domain V38D/V41R/D60aP/Y60bD/T97aP/L97bR/H99Q/C122S/Y151L /E175D/Q192R/R217E/K224R
IIGGEFTTIENQPWFAAIYRRHRGGSDTYRCGGSLISPCWVISATHCFIPDPKKEDYIVYLGRSRLNSNTQGEMKFEVENLILHKDYSADPRAQHNDIALLKIRSKEGRCAQPSRTIQTISLPSMYNDPQFGTSCEITGFGKENSTDYLLPEQLKMTVVKLISHRECQQPHYYGSDVTTKMLCAADPQWKTDSCRGDSGGPLVCSLQGRMTLTGIVSWGEGCALKDRPGVYTRVSHFLPWIRSHTKEENGLAL

SEQ ID NO: 845 - protein, 253 aa, Artificial Sequence
  UROKINASE-TYPE PLASMINOGEN ACTIVATOR (u-PA) protease domain V38D/V41Q/Y60bP/T97aW/L97bR/H99Q/C122S/Y151L/E175D /Q192K/R217E/K224R
IIGGEFTTIENQPWFAAIYRRHRGGSDTYQCGGSLISPCWVISATHCFIDPPKKEDYIVYLGRSRLNSNTQGEMKFEVENLILHKDYSADWRAQHNDIALLKIRSKEGRCAQPSRTIQTISLPSMYNDPQFGTSCEITGFGKENSTDYLLPEQLKMTVVKLISHRECQQPHYYGSDVTTKMLCAADPQWKTDSCKGDSGGPLVCSLQGRMTLTGIVSWGEGCALKDRPGVYTRVSHFLPWIRSHTKEENGLAL

SEQ ID NO: 846 - protein, 253 aa, Artificial Sequence
  UROKINASE-TYPE PLASMINOGEN ACTIVATOR (u-PA) protease domain R37aS/V38D/V41R/Y60bT/T97aD/L97bR/H99Q/C122S/Y151L /E175D/Q192A/R217E/K224R
IIGGEFTTIENQPWFAAIYRRHSGGSDTYRCGGSLISPCWVISATHCFIDTPKKEDYIVYLGRSRLNSNTQGEMKFEVENLILHKDYSADDRAQHNDIALLKIRSKEGRCAQPSRTIQTISLPSMYNDPQFGTSCEITGFGKENSTDYLLPEQLKMTVVKLISHRECQQPHYYGSDVTTKMLCAADPQWKTDSCAGDSGGPLVCSLQGRMTLTGIVSWGEGCALKDRPGVYTRVSHFLPWIRSHTKEENGLAL

SEQ ID NO: 847 - protein, 253 aa, Artificial Sequence
  UROKINASE-TYPE PLASMINOGEN ACTIVATOR (u-PA) protease domain V38D/V41K/D60aE/Y60bP/T97aA/L97bR/H99L/C122S/Y151L /E175D/Q192R/R217E/K224R
IIGGEFTTIENQPWFAAIYRRHRGGSDTYKCGGSLISPCWVISATHCFIEPPKKEDYIVYLGRSRLNSNTQGEMKFEVENLILHKDYSADARALHNDIALLKIRSKEGRCAQPSRTIQTISLPSMYNDPQFGTSCEITGFGKENSTDYLLPEQLKMTVVKLISHRECQQPHYYGSDVTTKMLCAADPQWKTDSCRGDSGGPLVCSLQGRMTLTGIVSWGEGCALKDRPGVYTRVSHFLPWIRSHTKEENGLAL

SEQ ID NO: 848 - protein, 253 aa, Artificial Sequence
  UROKINASE-TYPE PLASMINOGEN ACTIVATOR (u-PA) protease domain R37aS/V38D/V41R/D60aS/Y60bP/L97bR/H99Q/C122S/Y151L /E175D/Q192R/R217E/K224R
IIGGEFTTIENQPWFAAIYRRHSGGSDTYRCGGSLISPCWVISATHCFISPPKKEDYIVYLGRSRLNSNTQGEMKFEVENLILHKDYSADTRAQHNDIALLKIRSKEGRCAQPSRTIQTISLPSMYNDPQFGTSCEITGFGKENSTDYLLPEQLKMTVVKLISHRECQQPHYYGSDVTTKMLCAADPQWKTDSCRGDSGGPLVCSLQGRMTLTGIVSWGEGCALKDRPGVYTRVSHFLPWIRSHTKEENGLAL

SEQ ID NO: 849 - protein, 253 aa, Artificial Sequence
  UROKINASE-TYPE PLASMINOGEN ACTIVATOR (u-PA) protease domain V38D/V41R/Y60bR/L97bR/H99E/C122S/Y151L/E175D/Q192T /R217E/K224R
IIGGEFTTIENQPWFAAIYRRHRGGSDTYRCGGSLISPCWVISATHCFIDRPKKEDYIVYLGRSRLNSNTQGEMKFEVENLILHKDYSADTRAEHNDIALLKIRSKEGRCAQPSRTIQTISLPSMYNDPQFGTSCEITGFGKENSTDYLLPEQLKMTVVKLISHRECQQPHYYGSDVTTKMLCAADPQWKTDSCTGDSGGPLVCSLQGRMTLTGIVSWGEGCALKDRPGVYTRVSHFLPWIRSHTKEENGLAL

SEQ ID NO: 850 - protein, 253 aa, Artificial Sequence
  UROKINASE-TYPE PLASMINOGEN ACTIVATOR (u-PA) protease domain V38D/V41R/D60aP/Y60bD/T97aW/L97bR/H99Q/C122S/Y151L /E175D/Q192A/R217E/K224R
IIGGEFTTIENQPWFAAIYRRHRGGSDTYRCGGSLISPCWVISATHCFIPDPKKEDYIVYLGRSRLNSNTQGEMKFEVENLILHKDYSADWRAQHNDIALLKIRSKEGRCAQPSRTIQTISLPSMYNDPQFGTSCEITGFGKENSTDYLLPEQLKMTVVKLISHRECQQPHYYGSDVTTKMLCAADPQWKTDSCAGDSGGPLVCSLQGRMTLTGIVSWGEGCALKDRPGVYTRVSHFLPWIRSHTKEENGLAL

SEQ ID NO: 851 - protein, 253 aa, Artificial Sequence
  UROKINASE-TYPE PLASMINOGEN ACTIVATOR (u-PA) protease domain V38D/V41Q/D60aN/Y60bP/L97bR/H99L/C122S/Y151L/E175D /Q192R/R217E/K224R
IIGGEFTTIENQPWFAAIYRRHRGGSDTYQCGGSLISPCWVISATHCFINPPKKEDYIVYLGRSRLNSNTQGEMKFEVENLILHKDYSADTRALHNDIALLKIRSKEGRCAQPSRTIQTISLPSMYNDPQFGTSCEITGFGKENSTDYLLPEQLKMTVVKLISHRECQQPHYYGSDVTTKMLCAADPQWKTDSCRGDSGGPLVCSLQGRMTLTGIVSWGEGCALKDRPGVYTRVSHFLPWIRSHTKEENGLAL

SEQ ID NO: 852 - protein, 253 aa, Artificial Sequence
  UROKINASE-TYPE PLASMINOGEN ACTIVATOR (u-PA) protease domain V38D/V41Q/D60aN/Y60bP/T97aN/L97bR/H99I/C122S/Y151L /E175D/Q192R/R217E/K224R
IIGGEFTTIENQPWFAAIYRRHRGGSDTYQCGGSLISPCWVISATHCFINPPKKEDYIVYLGRSRLNSNTQGEMKFEVENLILHKDYSADNRAIHNDIALLKIRSKEGRCAQPSRTIQTISLPSMYNDPQFGTSCEITGFGKENSTDYLLPEQLKMTVVKLISHRECQQPHYYGSDVTTKMLCAADPQWKTDSCRGDSGGPLVCSLQGRMTLTGIVSWGEGCALKDRPGVYTRVSHFLPWIRSHTKEENGLAL

SEQ ID NO: 853 - protein, 253 aa, Artificial Sequence
  UROKINASE-TYPE PLASMINOGEN ACTIVATOR (u-PA) protease domain V38D/V41Q/Y60bP/T97aY/L97bR/H99L/C122S/Y151L/E175D /Q192K/R217E/K224R
IIGGEFTTIENQPWFAAIYRRHRGGSDTYQCGGSLISPCWVISATHCFIDPPKKEDYIVYLGRSRLNSNTQGEMKFEVENLILHKDYSADYRALHNDIALLKIRSKEGRCAQPSRTIQTISLPSMYNDPQFGTSCEITGFGKENSTDYLLPEQLKMTVVKLISHRECQQPHYYGSDVTTKMLCAADPQWKTDSCKGDSGGPLVCSLQGRMTLTGIVSWGEGCALKDRPGVYTRVSHFLPWIRSHTKEENGLAL

SEQ ID NO: 854 - protein, 253 aa, Artificial Sequence
  UROKINASE-TYPE PLASMINOGEN ACTIVATOR (u-PA) protease domain V38D/V41R/Y60bR/L97bR/H99L/C122S/Y151L/E175D/Q192T /R217E/K224R
IIGGEFTTIENQPWFAAIYRRHRGGSDTYRCGGSLISPCWVISATHCFIDRPKKEDYIVYLGRSRLNSNTQGEMKFEVENLILHKDYSADTRALHNDIALLKIRSKEGRCAQPSRTIQTISLPSMYNDPQFGTSCEITGFGKENSTDYLLPEQLKMTVVKLISHRECQQPHYYGSDVTTKMLCAADPQWKTDSCTGDSGGPLVCSLQGRMTLTGIVSWGEGCALKDRPGVYTRVSHFLPWIRSHTKEENGLAL

SEQ ID NO: 855 - protein, 253 aa, Artificial Sequence
  UROKINASE-TYPE PLASMINOGEN ACTIVATOR (u-PA) protease domain V38D/V41R/Y60bR/L97bR/H99L/C122S/Y151L/E175D/Q192Y /R217E/K224R
IIGGEFTTIENQPWFAAIYRRHRGGSDTYRCGGSLISPCWVISATHCFIDRPKKEDYIVYLGRSRLNSNTQGEMKFEVENLILHKDYSADTRALHNDIALLKIRSKEGRCAQPSRTIQTISLPSMYNDPQFGTSCEITGFGKENSTDYLLPEQLKMTVVKLISHRECQQPHYYGSDVTTKMLCAADPQWKTDSCYGDSGGPLVCSLQGRMTLTGIVSWGEGCALKDRPGVYTRVSHFLPWIRSHTKEENGLAL

SEQ ID NO: 856 - protein, 253 aa, Artificial Sequence
  UROKINASE-TYPE PLASMINOGEN ACTIVATOR (u-PA) protease domain V38D/V41R/L97bT/C122S/Y151F/R217E
IIGGEFTTIENQPWFAAIYRRHRGGSDTYRCGGSLISPCWVISATHCFIDYPKKEDYIVYLGRSRLNSNTQGEMKFEVENLILHKDYSADTTAHHNDIALLKIRSKEGRCAQPSRTIQTISLPSMYNDPQFGTSCEITGFGKENSTDYLFPEQLKMTVVKLISHRECQQPHYYGSEVTTKMLCAADPQWKTDSCQGDSGGPLVCSLQGRMTLTGIVSWGEGCALKDKPGVYTRVSHFLPWIRSHTKEENGLAL

SEQ ID NO: 857 - protein, 253 aa, Artificial Sequence
  UROKINASE-TYPE PLASMINOGEN ACTIVATOR (u-PA) protease domain V38D/V41K/L97bA/H99L/C122S/Y151R/R217E
IIGGEFTTIENQPWFAAIYRRHRGGSDTYKCGGSLISPCWVISATHCFIDYPKKEDYIVYLGRSRLNSNTQGEMKFEVENLILHKDYSADTAALHNDIALLKIRSKEGRCAQPSRTIQTISLPSMYNDPQFGTSCEITGFGKENSTDYLRPEQLKMTVVKLISHRECQQPHYYGSEVTTKMLCAADPQWKTDSCQGDSGGPLVCSLQGRMTLTGIVSWGEGCALKDKPGVYTRVSHFLPWIRSHTKEENGLAL

SEQ ID NO: 858 - protein, 253 aa, Artificial Sequence
  UROKINASE-TYPE PLASMINOGEN ACTIVATOR (u-PA) protease domain V38D/V41R/L97bN/H99E/C122S/E175D/Q192M/R217E
IIGGEFTTIENQPWFAAIYRRHRGGSDTYRCGGSLISPCWVISATHCFIDYPKKEDYIVYLGRSRLNSNTQGEMKFEVENLILHKDYSADTNAEHNDIALLKIRSKEGRCAQPSRTIQTISLPSMYNDPQFGTSCEITGFGKENSTDYLYPEQLKMTVVKLISHRECQQPHYYGSDVTTKMLCAADPQWKTDSCMGDSGGPLVCSLQGRMTLTGIVSWGEGCALKDKPGVYTRVSHFLPWIRSHTKEENGLAL

SEQ ID NO: 859 - protein, 253 aa, Artificial Sequence
  UROKINASE-TYPE PLASMINOGEN ACTIVATOR (u-PA) protease domain R36H/V38D/T97aR/L97bG/H99Q/C122S/E175F
IIGGEFTTIENQPWFAAIYRHHRGGSDTYVCGGSLISPCWVISATHCFIDYPKKEDYIVYLGRSRLNSNTQGEMKFEVENLILHKDYSADRGAQHNDIALLKIRSKEGRCAQPSRTIQTISLPSMYNDPQFGTSCEITGFGKENSTDYLYPEQLKMTVVKLISHRECQQPHYYGSFVTTKMLCAADPQWKTDSCQGDSGGPLVCSLQGRMTLTGIVSWGRGCALKDKPGVYTRVSHFLPWIRSHTKEENGLAL

SEQ ID NO: 860 - protein, 253 aa, Artificial Sequence
  UROKINASE-TYPE PLASMINOGEN ACTIVATOR (u-PA) protease domain R35S/V38D/V41L/D60aP/Y60bW/L97bG/H99Q/C122S
IIGGEFTTIENQPWFAAIYSRHRGGSDTYLCGGSLISPCWVISATHCFIPWPKKEDYIVYLGRSRLNSNTQGEMKFEVENLILHKDYSADTGAQHNDIALLKIRSKEGRCAQPSRTIQTISLPSMYNDPQFGTSCEITGFGKENSTDYLYPEQLKMTVVKLISHRECQQPHYYGSEVTTKMLCAADPQWKTDSCQGDSGGPLVCSLQGRMTLTGIVSWGRGCALKDKPGVYTRVSHFLPWIRSHTKEENGLAL

SEQ ID NO: 861 - protein, 253 aa, Artificial Sequence
  UROKINASE-TYPE PLASMINOGEN ACTIVATOR (u-PA) protease domain V38D/V41R/D60aQ/Y60bP/L97bG/H99Q/C122S
IIGGEFTTIENQPWFAAIYRRHRGGSDTYRCGGSLISPCWVISATHCFIQPPKKEDYIVYLGRSRLNSNTQGEMKFEVENLILHKDYSADTGAQHNDIALLKIRSKEGRCAQPSRTIQTISLPSMYNDPQFGTSCEITGFGKENSTDYLYPEQLKMTVVKLISHRECQQPHYYGSEVTTKMLCAADPQWKTDSCQGDSGGPLVCSLQGRMTLTGIVSWGRGCALKDKPGVYTRVSHFLPWIRSHTKEENGLAL

SEQ ID NO: 862 - protein, 253 aa, Artificial Sequence
  UROKINASE-TYPE PLASMINOGEN ACTIVATOR (u-PA) protease domain R35Q/V38D/Y40H/V41L/Y60bD/L97bG/H99Q/C122S
IIGGEFTTIENQPWFAAIYQRHRGGSDTHLCGGSLISPCWVISATHCFIDDPKKEDYIVYLGRSRLNSNTQGEMKFEVENLILHKDYSADTGAQHNDIALLKIRSKEGRCAQPSRTIQTISLPSMYNDPQFGTSCEITGFGKENSTDYLYPEQLKMTVVKLISHRECQQPHYYGSEVTTKMLCAADPQWKTDSCQGDSGGPLVCSLQGRMTLTGIVSWGRGCALKDKPGVYTRVSHFLPWIRSHTKEENGLAL

SEQ ID NO: 863 - protein, 253 aa, Artificial Sequence
  UROKINASE-TYPE PLASMINOGEN ACTIVATOR (u-PA) protease domain R37aS/V38D/V41R/D60aT/Y60bN/L97bG/H99Q/C122S
IIGGEFTTIENQPWFAAIYRRHSGGSDTYRCGGSLISPCWVISATHCFITNPKKEDYIVYLGRSRLNSNTQGEMKFEVENLILHKDYSADTGAQHNDIALLKIRSKEGRCAQPSRTIQTISLPSMYNDPQFGTSCEITGFGKENSTDYLYPEQLKMTVVKLISHRECQQPHYYGSEVTTKMLCAADPQWKTDSCQGDSGGPLVCSLQGRMTLTGIVSWGRGCALKDKPGVYTRVSHFLPWIRSHTKEENGLAL

SEQ ID NO: 864 - protein, 253 aa, Artificial Sequence
  UROKINASE-TYPE PLASMINOGEN ACTIVATOR (u-PA) protease domain R35K/V38D/Y40H/Y60bP/L97bG/H99Q/C122S
IIGGEFTTIENQPWFAAIYKRHRGGSDTHVCGGSLISPCWVISATHCFIDPPKKEDYIVYLGRSRLNSNTQGEMKFEVENLILHKDYSADTGAQHNDIALLKIRSKEGRCAQPSRTIQTISLPSMYNDPQFGTSCEITGFGKENSTDYLYPEQLKMTVVKLISHRECQQPHYYGSEVTTKMLCAADPQWKTDSCQGDSGGPLVCSLQGRMTLTGIVSWGRGCALKDKPGVYTRVSHFLPWIRSHTKEENGLAL

SEQ ID NO: 865 - protein, 253 aa, Artificial Sequence
  UROKINASE-TYPE PLASMINOGEN ACTIVATOR (u-PA) protease domain R35Q/V38D/Y40M/V41R/Y60bA/L97bG/H99Q/C122S
IIGGEFTTIENQPWFAAIYQRHRGGSDTMRCGGSLISPCWVISATHCFIDAPKKEDYIVYLGRSRLNSNTQGEMKFEVENLILHKDYSADTGAQHNDIALLKIRSKEGRCAQPSRTIQTISLPSMYNDPQFGTSCEITGFGKENSTDYLYPEQLKMTVVKLISHRECQQPHYYGSEVTTKMLCAADPQWKTDSCQGDSGGPLVCSLQGRMTLTGIVSWGRGCALKDKPGVYTRVSHFLPWIRSHTKEENGLAL

SEQ ID NO: 866 - protein, 253 aa, Artificial Sequence
  UROKINASE-TYPE PLASMINOGEN ACTIVATOR (u-PA) protease domain R35K/V38D/Y40F/V41R/Y60bT/L97bG/H99Q/C122S
IIGGEFTTIENQPWFAAIYKRHRGGSDTFRCGGSLISPCWVISATHCFIDTPKKEDYIVYLGRSRLNSNTQGEMKFEVENLILHKDYSADTGAQHNDIALLKIRSKEGRCAQPSRTIQTISLPSMYNDPQFGTSCEITGFGKENSTDYLYPEQLKMTVVKLISHRECQQPHYYGSEVTTKMLCAADPQWKTDSCQGDSGGPLVCSLQGRMTLTGIVSWGRGCALKDKPGVYTRVSHFLPWIRSHTKEENGLAL

SEQ ID NO: 867 - protein, 253 aa, Artificial Sequence
  UROKINASE-TYPE PLASMINOGEN ACTIVATOR (u-PA) protease domain R35Q/V38D/Y40F/V41T/Y60bP/L97bG/H99Q/C122S
IIGGEFTTIENQPWFAAIYQRHRGGSDTFTCGGSLISPCWVISATHCFIDPPKKEDYIVYLGRSRLNSNTQGEMKFEVENLILHKDYSADTGAQHNDIALLKIRSKEGRCAQPSRTIQTISLPSMYNDPQFGTSCEITGFGKENSTDYLYPEQLKMTVVKLISHRECQQPHYYGSEVTTKMLCAADPQWKTDSCQGDSGGPLVCSLQGRMTLTGIVSWGRGCALKDKPGVYTRVSHFLPWIRSHTKEENGLAL

SEQ ID NO: 868 - protein, 253 aa, Artificial Sequence
  UROKINASE-TYPE PLASMINOGEN ACTIVATOR (u-PA) protease domain V38D/T39W/Y40L/V41R/T97aL/L97bA/H99Q/C122S
IIGGEFTTIENQPWFAAIYRRHRGGSDWLRCGGSLISPCWVISATHCFIDYPKKEDYIVYLGRSRLNSNTQGEMKFEVENLILHKDYSADLAAQHNDIALLKIRSKEGRCAQPSRTIQTISLPSMYNDPQFGTSCEITGFGKENSTDYLYPEQLKMTVVKLISHRECQQPHYYGSEVTTKMLCAADPQWKTDSCQGDSGGPLVCSLQGRMTLTGIVSWGRGCALKDKPGVYTRVSHFLPWIRSHTKEENGLAL

SEQ ID NO: 869 - protein, 253 aa, Artificial Sequence
  UROKINASE-TYPE PLASMINOGEN ACTIVATOR (u-PA) protease domain V38D/T39F/Y40L/V41R/T97aW/L97bA/H99Q/C122S
IIGGEFTTIENQPWFAAIYRRHRGGSDFLRCGGSLISPCWVISATHCFIDYPKKEDYIVYLGRSRLNSNTQGEMKFEVENLILHKDYSADWAAQHNDIALLKIRSKEGRCAQPSRTIQTISLPSMYNDPQFGTSCEITGFGKENSTDYLYPEQLKMTVVKLISHRECQQPHYYGSEVTTKMLCAADPQWKTDSCQGDSGGPLVCSLQGRMTLTGIVSWGRGCALKDKPGVYTRVSHFLPWIRSHTKEENGLAL

SEQ ID NO: 870 - protein, 253 aa, Artificial Sequence
  UROKINASE-TYPE PLASMINOGEN ACTIVATOR (u-PA) protease domain V38D/T39Y/Y40Q/V41L/T97aY/L97bA/H99Q/C122S
IIGGEFTTIENQPWFAAIYRRHRGGSDYQLCGGSLISPCWVISATHCFIDYPKKEDYIVYLGRSRLNSNTQGEMKFEVENLILHKDYSADYAAQHNDIALLKIRSKEGRCAQPSRTIQTISLPSMYNDPQFGTSCEITGFGKENSTDYLYPEQLKMTVVKLISHRECQQPHYYGSEVTTKMLCAADPQWKTDSCQGDSGGPLVCSLQGRMTLTGIVSWGRGCALKDKPGVYTRVSHFLPWIRSHTKEENGLAL

SEQ ID NO: 871 - protein, 253 aa, Artificial Sequence
  UROKINASE-TYPE PLASMINOGEN ACTIVATOR (u-PA) protease domain R37aS/V38D/T39Y/Y40M/V41R/T97aL/L97bA/H99Q/C122S
IIGGEFTTIENQPWFAAIYRRHSGGSDYMRCGGSLISPCWVISATHCFIDYPKKEDYIVYLGRSRLNSNTQGEMKFEVENLILHKDYSADLAAQHNDIALLKIRSKEGRCAQPSRTIQTISLPSMYNDPQFGTSCEITGFGKENSTDYLYPEQLKMTVVKLISHRECQQPHYYGSEVTTKMLCAADPQWKTDSCQGDSGGPLVCSLQGRMTLTGIVSWGRGCALKDKPGVYTRVSHFLPWIRSHTKEENGLAL

SEQ ID NO: 872 - protein, 253 aa, Artificial Sequence
  UROKINASE-TYPE PLASMINOGEN ACTIVATOR (u-PA) protease domain V38D/T39L/Y40L/V41R/T97aV/L97bA/H99Q/C122S
IIGGEFTTIENQPWFAAIYRRHRGGSDLLRCGGSLISPCWVISATHCFIDYPKKEDYIVYLGRSRLNSNTQGEMKFEVENLILHKDYSADVAAQHNDIALLKIRSKEGRCAQPSRTIQTISLPSMYNDPQFGTSCEITGFGKENSTDYLYPEQLKMTVVKLISHRECQQPHYYGSEVTTKMLCAADPQWKTDSCQGDSGGPLVCSLQGRMTLTGIVSWGRGCALKDKPGVYTRVSHFLPWIRSHTKEENGLAL

SEQ ID NO: 873 - protein, 253 aa, Artificial Sequence
  UROKINASE-TYPE PLASMINOGEN ACTIVATOR (u-PA) protease domain V38D/T39L/Y40L/V41R/T97aI/L97bA/H99Q/C122S
IIGGEFTTIENQPWFAAIYRRHRGGSDLLRCGGSLISPCWVISATHCFIDYPKKEDYIVYLGRSRLNSNTQGEMKFEVENLILHKDYSADIAAQHNDIALLKIRSKEGRCAQPSRTIQTISLPSMYNDPQFGTSCEITGFGKENSTDYLYPEQLKMTVVKLISHRECQQPHYYGSEVTTKMLCAADPQWKTDSCQGDSGGPLVCSLQGRMTLTGIVSWGRGCALKDKPGVYTRVSHFLPWIRSHTKEENGLAL

SEQ ID NO: 874 - protein, 253 aa, Artificial Sequence
  UROKINASE-TYPE PLASMINOGEN ACTIVATOR (u-PA) protease domain V38D/T39L/Y40L/V41R/T97aW/L97bA/H99Q/C122S
IIGGEFTTIENQPWFAAIYRRHRGGSDLLRCGGSLISPCWVISATHCFIDYPKKEDYIVYLGRSRLNSNTQGEMKFEVENLILHKDYSADWAAQHNDIALLKIRSKEGRCAQPSRTIQTISLPSMYNDPQFGTSCEITGFGKENSTDYLYPEQLKMTVVKLISHRECQQPHYYGSEVTTKMLCAADPQWKTDSCQGDSGGPLVCSLQGRMTLTGIVSWGRGCALKDKPGVYTRVSHFLPWIRSHTKEENGLAL

SEQ ID NO: 875 - protein, 253 aa, Artificial Sequence
  UROKINASE-TYPE PLASMINOGEN ACTIVATOR (u-PA) protease domain V38D/T39Y/Y40H/V41R/T97aI/L97bA/H99Q/C122S
IIGGEFTTIENQPWFAAIYRRHRGGSDYHRCGGSLISPCWVISATHCFIDYPKKEDYIVYLGRSRLNSNTQGEMKFEVENLILHKDYSADIAAQHNDIALLKIRSKEGRCAQPSRTIQTISLPSMYNDPQFGTSCEITGFGKENSTDYLYPEQLKMTVVKLISHRECQQPHYYGSEVTTKMLCAADPQWKTDSCQGDSGGPLVCSLQGRMTLTGIVSWGRGCALKDKPGVYTRVSHFLPWIRSHTKEENGLAL

SEQ ID NO: 876 - protein, 253 aa, Artificial Sequence
  UROKINASE-TYPE PLASMINOGEN ACTIVATOR (u-PA) protease domain V38D/T39Y/Y40L/V41R/T97aW/L97bA/H99Q/C122S
IIGGEFTTIENQPWFAAIYRRHRGGSDYLRCGGSLISPCWVISATHCFIDYPKKEDYIVYLGRSRLNSNTQGEMKFEVENLILHKDYSADWAAQHNDIALLKIRSKEGRCAQPSRTIQTISLPSMYNDPQFGTSCEITGFGKENSTDYLYPEQLKMTVVKLISHRECQQPHYYGSEVTTKMLCAADPQWKTDSCQGDSGGPLVCSLQGRMTLTGIVSWGRGCALKDKPGVYTRVSHFLPWIRSHTKEENGLAL

SEQ ID NO: 877 - protein, 253 aa, Artificial Sequence
  UROKINASE-TYPE PLASMINOGEN ACTIVATOR (u-PA) protease domain V38D/T39Y/Y40M/V41R/T97aW/L97bA/H99Q/C122S
IIGGEFTTIENQPWFAAIYRRHRGGSDYMRCGGSLISPCWVISATHCFIDYPKKEDYIVYLGRSRLNSNTQGEMKFEVENLILHKDYSADWAAQHNDIALLKIRSKEGRCAQPSRTIQTISLPSMYNDPQFGTSCEITGFGKENSTDYLYPEQLKMTVVKLISHRECQQPHYYGSEVTTKMLCAADPQWKTDSCQGDSGGPLVCSLQGRMTLTGIVSWGRGCALKDKPGVYTRVSHFLPWIRSHTKEENGLAL

SEQ ID NO: 878 - protein, 253 aa, Artificial Sequence
  UROKINASE-TYPE PLASMINOGEN ACTIVATOR (u-PA) protease domain V38D/T39Y/Y40L/V41R/T97aE/L97bA/H99Q/C122S
IIGGEFTTIENQPWFAAIYRRHRGGSDYLRCGGSLISPCWVISATHCFIDYPKKEDYIVYLGRSRLNSNTQGEMKFEVENLILHKDYSADEAAQHNDIALLKIRSKEGRCAQPSRTIQTISLPSMYNDPQFGTSCEITGFGKENSTDYLYPEQLKMTVVKLISHRECQQPHYYGSEVTTKMLCAADPQWKTDSCQGDSGGPLVCSLQGRMTLTGIVSWGRGCALKDKPGVYTRVSHFLPWIRSHTKEENGLAL

SEQ ID NO: 879 - protein, 253 aa, Artificial Sequence
  UROKINASE-TYPE PLASMINOGEN ACTIVATOR (u-PA) protease domain V38D/T39Y/Y40M/V41R/T97aE/L97bA/H99Q/C122S
IIGGEFTTIENQPWFAAIYRRHRGGSDYMRCGGSLISPCWVISATHCFIDYPKKEDYIVYLGRSRLNSNTQGEMKFEVENLILHKDYSADEAAQHNDIALLKIRSKEGRCAQPSRTIQTISLPSMYNDPQFGTSCEITGFGKENSTDYLYPEQLKMTVVKLISHRECQQPHYYGSEVTTKMLCAADPQWKTDSCQGDSGGPLVCSLQGRMTLTGIVSWGRGCALKDKPGVYTRVSHFLPWIRSHTKEENGLAL

SEQ ID NO: 880 - protein, 253 aa, Artificial Sequence
  UROKINASE-TYPE PLASMINOGEN ACTIVATOR (u-PA) protease domain R35S/V38D/V41T/L97bR/H99Q/C122S/Y151L/R217E
IIGGEFTTIENQPWFAAIYSRHRGGSDTYTCGGSLISPCWVISATHCFIDYPKKEDYIVYLGRSRLNSNTQGEMKFEVENLILHKDYSADTRAQHNDIALLKIRSKEGRCAQPSRTIQTISLPSMYNDPQFGTSCEITGFGKENSTDYLLPEQLKMTVVKLISHRECQQPHYYGSEVTTKMLCAADPQWKTDSCQGDSGGPLVCSLQGRMTLTGIVSWGEGCALKDKPGVYTRVSHFLPWIRSHTKEENGLAL

SEQ ID NO: 881 - protein, 253 aa, Artificial Sequence
  UROKINASE-TYPE PLASMINOGEN ACTIVATOR (u-PA) protease domain V38D/V41R/L97bR/H99Q/C122S/Y151L/R217E
IIGGEFTTIENQPWFAAIYRRHRGGSDTYRCGGSLISPCWVISATHCFIDYPKKEDYIVYLGRSRLNSNTQGEMKFEVENLILHKDYSADTRAQHNDIALLKIRSKEGRCAQPSRTIQTISLPSMYNDPQFGTSCEITGFGKENSTDYLLPEQLKMTVVKLISHRECQQPHYYGSEVTTKMLCAADPQWKTDSCQGDSGGPLVCSLQGRMTLTGIVSWGEGCALKDKPGVYTRVSHFLPWIRSHTKEENGLAL

SEQ ID NO: 882 - protein, 253 aa, Artificial Sequence
  UROKINASE-TYPE PLASMINOGEN ACTIVATOR (u-PA) protease domain V38D/V41R/L97bR/H99E/C122S/Y151L/R217E
IIGGEFTTIENQPWFAAIYRRHRGGSDTYRCGGSLISPCWVISATHCFIDYPKKEDYIVYLGRSRLNSNTQGEMKFEVENLILHKDYSADTRAEHNDIALLKIRSKEGRCAQPSRTIQTISLPSMYNDPQFGTSCEITGFGKENSTDYLLPEQLKMTVVKLISHRECQQPHYYGSEVTTKMLCAADPQWKTDSCQGDSGGPLVCSLQGRMTLTGIVSWGEGCALKDKPGVYTRVSHFLPWIRSHTKEENGLAL

SEQ ID NO: 883 - protein, 253 aa, Artificial Sequence
  UROKINASE-TYPE PLASMINOGEN ACTIVATOR (u-PA) protease domain R35H/V38D/V41Q/L97bR/H99Q/C122S/Y151L/R217V
IIGGEFTTIENQPWFAAIYHRHRGGSDTYQCGGSLISPCWVISATHCFIDYPKKEDYIVYLGRSRLNSNTQGEMKFEVENLILHKDYSADTRAQHNDIALLKIRSKEGRCAQPSRTIQTISLPSMYNDPQFGTSCEITGFGKENSTDYLLPEQLKMTVVKLISHRECQQPHYYGSEVTTKMLCAADPQWKTDSCQGDSGGPLVCSLQGRMTLTGIVSWGVGCALKDKPGVYTRVSHFLPWIRSHTKEENGLAL

SEQ ID NO: 884 - protein, 253 aa, Artificial Sequence
  UROKINASE-TYPE PLASMINOGEN ACTIVATOR (u-PA) protease domain V38D/V41R/L97bR/H99Q/C122S/Y151L/R217V
IIGGEFTTIENQPWFAAIYRRHRGGSDTYRCGGSLISPCWVISATHCFIDYPKKEDYIVYLGRSRLNSNTQGEMKFEVENLILHKDYSADTRAQHNDIALLKIRSKEGRCAQPSRTIQTISLPSMYNDPQFGTSCEITGFGKENSTDYLLPEQLKMTVVKLISHRECQQPHYYGSEVTTKMLCAADPQWKTDSCQGDSGGPLVCSLQGRMTLTGIVSWGVGCALKDKPGVYTRVSHFLPWIRSHTKEENGLAL

SEQ ID NO: 885 - protein, 253 aa, Artificial Sequence
  UROKINASE-TYPE PLASMINOGEN ACTIVATOR (u-PA) protease domain R37aS/V38D/V41R/L97bR/H99Q/C122S/Y151L/Q192T/R217V
IIGGEFTTIENQPWFAAIYRRHSGGSDTYRCGGSLISPCWVISATHCFIDYPKKEDYIVYLGRSRLNSNTQGEMKFEVENLILHKDYSADTRAQHNDIALLKIRSKEGRCAQPSRTIQTISLPSMYNDPQFGTSCEITGFGKENSTDYLLPEQLKMTVVKLISHRECQQPHYYGSEVTTKMLCAADPQWKTDSCTGDSGGPLVCSLQGRMTLTGIVSWGVGCALKDKPGVYTRVSHFLPWIRSHTKEENGLAL

SEQ ID NO: 886 - protein, 253 aa, Artificial Sequence
  UROKINASE-TYPE PLASMINOGEN ACTIVATOR (u-PA) protease domain V38D/T39Y/Y40L/V41K/L97bR/H99L/C122S/E175D
IIGGEFTTIENQPWFAAIYRRHRGGSDYLKCGGSLISPCWVISATHCFIDYPKKEDYIVYLGRSRLNSNTQGEMKFEVENLILHKDYSADTRALHNDIALLKIRSKEGRCAQPSRTIQTISLPSMYNDPQFGTSCEITGFGKENSTDYLYPEQLKMTVVKLISHRECQQPHYYGSDVTTKMLCAADPQWKTDSCQGDSGGPLVCSLQGRMTLTGIVSWGRGCALKDKPGVYTRVSHFLPWIRSHTKEENGLAL

SEQ ID NO: 887 - protein, 253 aa, Artificial Sequence
  UROKINASE-TYPE PLASMINOGEN ACTIVATOR (u-PA) protease domain R35Q/H37G/R37aN/V38F/T39H/V41Q/Y60bR/T97aL/L97bR/H 99E/C122S/Y151L/E175D/Q192T/R217E/K224R
IIGGEFTTIENQPWFAAIYQRGNGGSFHYQCGGSLISPCWVISATHCFIDRPKKEDYIVYLGRSRLNSNTQGEMKFEVENLILHKDYSADLRAEHNDIALLKIRSKEGRCAQPSRTIQTISLPSMYNDPQFGTSCEITGFGKENSTDYLLPEQLKMTVVKLISHRECQQPHYYGSDVTTKMLCAADPQWKTDSCTGDSGGPLVCSLQGRMTLTGIVSWGEGCALKDRPGVYTRVSHFLPWIRSHTKEENGLAL

SEQ ID NO: 888 - protein, 253 aa, Artificial Sequence
  UROKINASE-TYPE PLASMINOGEN ACTIVATOR (u-PA) protease domain H37N/R37aD/V38Y/T39F/V41Q/Y60bR/T97aW/L97bR/H99E/C 122S/Y151L/E175D/Q192T/R217E/K224R
IIGGEFTTIENQPWFAAIYRRNDGGSYFYQCGGSLISPCWVISATHCFIDRPKKEDYIVYLGRSRLNSNTQGEMKFEVENLILHKDYSADWRAEHNDIALLKIRSKEGRCAQPSRTIQTISLPSMYNDPQFGTSCEITGFGKENSTDYLLPEQLKMTVVKLISHRECQQPHYYGSDVTTKMLCAADPQWKTDSCTGDSGGPLVCSLQGRMTLTGIVSWGEGCALKDRPGVYTRVSHFLPWIRSHTKEENGLAL

SEQ ID NO: 889 - protein, 253 aa, Artificial Sequence
  UROKINASE-TYPE PLASMINOGEN ACTIVATOR (u-PA) protease domain H37A/R37aE/V38F/T39L/V41Q/Y60bR/T97aF/L97bR/H99E/C 122S/Y151L/E175D/Q192T/R217E/K224R
IIGGEFTTIENQPWFAAIYRRAEGGSFLYQCGGSLISPCWVISATHCFIDRPKKEDYIVYLGRSRLNSNTQGEMKFEVENLILHKDYSADFRAEHNDIALLKIRSKEGRCAQPSRTIQTISLPSMYNDPQFGTSCEITGFGKENSTDYLLPEQLKMTVVKLISHRECQQPHYYGSDVTTKMLCAADPQWKTDSCTGDSGGPLVCSLQGRMTLTGIVSWGEGCALKDRPGVYTRVSHFLPWIRSHTKEENGLAL

SEQ ID NO: 890 - protein, 253 aa, Artificial Sequence
  UROKINASE-TYPE PLASMINOGEN ACTIVATOR (u-PA) protease domain R35K/H37G/R37aE/G37bS/V38F/T39H/V41Q/Y60bR/T97aW/L 97bR/H99E/C122S/Y151L/E175D/Q192T/R217E/K224R
IIGGEFTTIENQPWFAAIYKRGESGSFHYQCGGSLISPCWVISATHCFIDRPKKEDYIVYLGRSRLNSNTQGEMKFEVENLILHKDYSADWRAEHNDIALLKIRSKEGRCAQPSRTIQTISLPSMYNDPQFGTSCEITGFGKENSTDYLLPEQLKMTVVKLISHRECQQPHYYGSDVTTKMLCAADPQWKTDSCTGDSGGPLVCSLQGRMTLTGIVSWGEGCALKDRPGVYTRVSHFLPWIRSHTKEENGLAL

SEQ ID NO: 891 - protein, 253 aa, Artificial Sequence
  UROKINASE-TYPE PLASMINOGEN ACTIVATOR (u-PA) protease domain H37A/R37aE/V38F/T39L/V41Q/Y60bR/T97aW/L97bR/H99E/C 122S/Y151L/E175D/Q192T/R217E/K224R
IIGGEFTTIENQPWFAAIYRRAEGGSFLYQCGGSLISPCWVISATHCFIDRPKKEDYIVYLGRSRLNSNTQGEMKFEVENLILHKDYSADWRAEHNDIALLKIRSKEGRCAQPSRTIQTISLPSMYNDPQFGTSCEITGFGKENSTDYLLPEQLKMTVVKLISHRECQQPHYYGSDVTTKMLCAADPQWKTDSCTGDSGGPLVCSLQGRMTLTGIVSWGEGCALKDRPGVYTRVSHFLPWIRSHTKEENGLAL

SEQ ID NO: 892 - protein, 253 aa, Artificial Sequence
  UROKINASE-TYPE PLASMINOGEN ACTIVATOR (u-PA) protease domain H37N/R37aE/V38F/T39L/V41Q/Y60bR/T97aW/L97bR/H99E/C 122S/Y151L/E175D/Q192T/R217E/K224R
IIGGEFTTIENQPWFAAIYRRNEGGSFLYQCGGSLISPCWVISATHCFIDRPKKEDYIVYLGRSRLNSNTQGEMKFEVENLILHKDYSADWRAEHNDIALLKIRSKEGRCAQPSRTIQTISLPSMYNDPQFGTSCEITGFGKENSTDYLLPEQLKMTVVKLISHRECQQPHYYGSDVTTKMLCAADPQWKTDSCTGDSGGPLVCSLQGRMTLTGIVSWGEGCALKDRPGVYTRVSHFLPWIRSHTKEENGLAL

SEQ ID NO: 893 - protein, 253 aa, Artificial Sequence
  UROKINASE-TYPE PLASMINOGEN ACTIVATOR (u-PA) protease domain R35G/H37T/R37aE/V38T/T39Y/V41Q/Y60bR/T97aF/L97bR/H 99E/C122S/Y151L/E175D/Q192T/R217E/K224R
IIGGEFTTIENQPWFAAIYGRTEGGSTYYQCGGSLISPCWVISATHCFIDRPKKEDYIVYLGRSRLNSNTQGEMKFEVENLILHKDYSADFRAEHNDIALLKIRSKEGRCAQPSRTIQTISLPSMYNDPQFGTSCEITGFGKENSTDYLLPEQLKMTVVKLISHRECQQPHYYGSDVTTKMLCAADPQWKTDSCTGDSGGPLVCSLQGRMTLTGIVSWGEGCALKDRPGVYTRVSHFLPWIRSHTKEENGLAL

SEQ ID NO: 894 - protein, 253 aa, Artificial Sequence
  UROKINASE-TYPE PLASMINOGEN ACTIVATOR (u-PA) protease domain R35K/H37S/R37aE/V38F/T39Y/V41Q/Y60bR/T97aL/L97bR/H 99E/C122S/Y151L/E175D/Q192T/R217E/K224R
IIGGEFTTIENQPWFAAIYKRSEGGSFYYQCGGSLISPCWVISATHCFIDRPKKEDYIVYLGRSRLNSNTQGEMKFEVENLILHKDYSADLRAEHNDIALLKIRSKEGRCAQPSRTIQTISLPSMYNDPQFGTSCEITGFGKENSTDYLLPEQLKMTVVKLISHRECQQPHYYGSDVTTKMLCAADPQWKTDSCTGDSGGPLVCSLQGRMTLTGIVSWGEGCALKDRPGVYTRVSHFLPWIRSHTKEENGLAL

SEQ ID NO: 895 - protein, 253 aa, Artificial Sequence
  UROKINASE-TYPE PLASMINOGEN ACTIVATOR (u-PA) protease domain H37A/R37aE/V38Y/T39Y/V41Q/Y60bR/T97aV/L97bR/H99E/C 122S/Y151L/E175D/Q192T/R217E/K224R
IIGGEFTTIENQPWFAAIYRRAEGGSYYYQCGGSLISPCWVISATHCFIDRPKKEDYIVYLGRSRLNSNTQGEMKFEVENLILHKDYSADVRAEHNDIALLKIRSKEGRCAQPSRTIQTISLPSMYNDPQFGTSCEITGFGKENSTDYLLPEQLKMTVVKLISHRECQQPHYYGSDVTTKMLCAADPQWKTDSCTGDSGGPLVCSLQGRMTLTGIVSWGEGCALKDRPGVYTRVSHFLPWIRSHTKEENGLAL

SEQ ID NO: 896 - protein, 253 aa, Artificial Sequence
  UROKINASE-TYPE PLASMINOGEN ACTIVATOR (u-PA) protease domain H37D/R37aD/V38Y/T39Y/V41Q/Y60bR/T97aL/L97bR/H99E/C 122S/Y151L/E175D/Q192T/R217E/K224R
IIGGEFTTIENQPWFAAIYRRDDGGSYYYQCGGSLISPCWVISATHCFIDRPKKEDYIVYLGRSRLNSNTQGEMKFEVENLILHKDYSADLRAEHNDIALLKIRSKEGRCAQPSRTIQTISLPSMYNDPQFGTSCEITGFGKENSTDYLLPEQLKMTVVKLISHRECQQPHYYGSDVTTKMLCAADPQWKTDSCTGDSGGPLVCSLQGRMTLTGIVSWGEGCALKDRPGVYTRVSHFLPWIRSHTKEENGLAL

SEQ ID NO: 897 - protein, 253 aa, Artificial Sequence
  UROKINASE-TYPE PLASMINOGEN ACTIVATOR (u-PA) protease domain H37A/R37aD/V38Y/T39Y/V41Q/Y60bR/T97aD/L97bR/H99E/C 122S/Y151L/E175D/Q192T/R217E/K224R
IIGGEFTTIENQPWFAAIYRRADGGSYYYQCGGSLISPCWVISATHCFIDRPKKEDYIVYLGRSRLNSNTQGEMKFEVENLILHKDYSADDRAEHNDIALLKIRSKEGRCAQPSRTIQTISLPSMYNDPQFGTSCEITGFGKENSTDYLLPEQLKMTVVKLISHRECQQPHYYGSDVTTKMLCAADPQWKTDSCTGDSGGPLVCSLQGRMTLTGIVSWGEGCALKDRPGVYTRVSHFLPWIRSHTKEENGLAL

SEQ ID NO: 898 - protein, 253 aa, Artificial Sequence
  UROKINASE-TYPE PLASMINOGEN ACTIVATOR (u-PA) protease domain H37S/R37aD/V38H/T39L/V41Q/Y60bR/T97aW/L97bR/H99E/C 122S/Y151L/E175D/Q192T/R217E/K224R
IIGGEFTTIENQPWFAAIYRRSDGGSHLYQCGGSLISPCWVISATHCFIDRPKKEDYIVYLGRSRLNSNTQGEMKFEVENLILHKDYSADWRAEHNDIALLKIRSKEGRCAQPSRTIQTISLPSMYNDPQFGTSCEITGFGKENSTDYLLPEQLKMTVVKLISHRECQQPHYYGSDVTTKMLCAADPQWKTDSCTGDSGGPLVCSLQGRMTLTGIVSWGEGCALKDRPGVYTRVSHFLPWIRSHTKEENGLAL

SEQ ID NO: 899 - protein, 253 aa, Artificial Sequence
  UROKINASE-TYPE PLASMINOGEN ACTIVATOR (u-PA) protease domain H37G/R37aD/V38Y/T39H/V41Q/Y60bR/T97aD/L97bR/H99E/C 122S/Y151L/E175D/Q192T/R217E/K224R
IIGGEFTTIENQPWFAAIYRRGDGGSYHYQCGGSLISPCWVISATHCFIDRPKKEDYIVYLGRSRLNSNTQGEMKFEVENLILHKDYSADDRAEHNDIALLKIRSKEGRCAQPSRTIQTISLPSMYNDPQFGTSCEITGFGKENSTDYLLPEQLKMTVVKLISHRECQQPHYYGSDVTTKMLCAADPQWKTDSCTGDSGGPLVCSLQGRMTLTGIVSWGEGCALKDRPGVYTRVSHFLPWIRSHTKEENGLAL

SEQ ID NO: 900 - protein, 253 aa, Artificial Sequence
  UROKINASE-TYPE PLASMINOGEN ACTIVATOR (u-PA) protease domain H37G/R37aD/G37bD/V38F/T39H/V41R/Y60bK/T97aS/L97bR/ H99E/C122S/Y151L/E175D/Q192T/R217E/K224R
IIGGEFTTIENQPWFAAIYRRGDDGSFHYRCGGSLISPCWVISATHCFIDKPKKEDYIVYLGRSRLNSNTQGEMKFEVENLILHKDYSADSRAEHNDIALLKIRSKEGRCAQPSRTIQTISLPSMYNDPQFGTSCEITGFGKENSTDYLLPEQLKMTVVKLISHRECQQPHYYGSDVTTKMLCAADPQWKTDSCTGDSGGPLVCSLQGRMTLTGIVSWGEGCALKDRPGVYTRVSHFLPWIRSHTKEENGLAL

SEQ ID NO: 901 - protein, 253 aa, Artificial Sequence
  UROKINASE-TYPE PLASMINOGEN ACTIVATOR (u-PA) protease domain R35Q/H37G/R37aE/V38Y/T39H/V41R/Y60bK/T97aS/L97bR/H 99E/C122S/Y151L/E175D/Q192T/R217E/K224R
IIGGEFTTIENQPWFAAIYQRGEGGSYHYRCGGSLISPCWVISATHCFIDKPKKEDYIVYLGRSRLNSNTQGEMKFEVENLILHKDYSADSRAEHNDIALLKIRSKEGRCAQPSRTIQTISLPSMYNDPQFGTSCEITGFGKENSTDYLLPEQLKMTVVKLISHRECQQPHYYGSDVTTKMLCAADPQWKTDSCTGDSGGPLVCSLQGRMTLTGIVSWGEGCALKDRPGVYTRVSHFLPWIRSHTKEENGLAL

SEQ ID NO: 902 - protein, 253 aa, Artificial Sequence
  UROKINASE-TYPE PLASMINOGEN ACTIVATOR (u-PA) protease domain R35K/H37A/R37aE/V38H/T39Y/V41R/Y60bK/T97aS/L97bR/H 99E/C122S/Y151L/E175D/Q192T/R217E/K224R
IIGGEFTTIENQPWFAAIYKRAEGGSHYYRCGGSLISPCWVISATHCFIDKPKKEDYIVYLGRSRLNSNTQGEMKFEVENLILHKDYSADSRAEHNDIALLKIRSKEGRCAQPSRTIQTISLPSMYNDPQFGTSCEITGFGKENSTDYLLPEQLKMTVVKLISHRECQQPHYYGSDVTTKMLCAADPQWKTDSCTGDSGGPLVCSLQGRMTLTGIVSWGEGCALKDRPGVYTRVSHFLPWIRSHTKEENGLAL

SEQ ID NO: 903 - protein, 253 aa, Artificial Sequence
  UROKINASE-TYPE PLASMINOGEN ACTIVATOR (u-PA) protease domain R35Q/H37G/R37aE/V38Y/T39F/V41R/Y60bK/T97aS/L97bR/H 99E/C122S/Y151L/E175D/Q192T/R217E/K224R
IIGGEFTTIENQPWFAAIYQRGEGGSYFYRCGGSLISPCWVISATHCFIDKPKKEDYIVYLGRSRLNSNTQGEMKFEVENLILHKDYSADSRAEHNDIALLKIRSKEGRCAQPSRTIQTISLPSMYNDPQFGTSCEITGFGKENSTDYLLPEQLKMTVVKLISHRECQQPHYYGSDVTTKMLCAADPQWKTDSCTGDSGGPLVCSLQGRMTLTGIVSWGEGCALKDRPGVYTRVSHFLPWIRSHTKEENGLAL

SEQ ID NO: 904 - protein, 253 aa, Artificial Sequence
  UROKINASE-TYPE PLASMINOGEN ACTIVATOR (u-PA) protease domain R35Q/H37G/R37aE/V38W/T39Y/V41R/Y60bK/T97aS/L97bR/H 99E/C122S/Y151L/E175D/Q192T/R217E/K224R
IIGGEFTTIENQPWFAAIYQRGEGGSWYYRCGGSLISPCWVISATHCFIDKPKKEDYIVYLGRSRLNSNTQGEMKFEVENLILHKDYSADSRAEHNDIALLKIRSKEGRCAQPSRTIQTISLPSMYNDPQFGTSCEITGFGKENSTDYLLPEQLKMTVVKLISHRECQQPHYYGSDVTTKMLCAADPQWKTDSCTGDSGGPLVCSLQGRMTLTGIVSWGEGCALKDRPGVYTRVSHFLPWIRSHTKEENGLAL

SEQ ID NO: 905 - protein, 253 aa, Artificial Sequence
  UROKINASE-TYPE PLASMINOGEN ACTIVATOR (u-PA) protease domain R36L/V38D/T39R/Y40L/V41T/L97bD/H99P/C122S/R217S
IIGGEFTTIENQPWFAAIYRLHRGGSDRLTCGGSLISPCWVISATHCFIDYPKKEDYIVYLGRSRLNSNTQGEMKFEVENLILHKDYSADTDAPHNDIALLKIRSKEGRCAQPSRTIQTISLPSMYNDPQFGTSCEITGFGKENSTDYLYPEQLKMTVVKLISHRECQQPHYYGSEVTTKMLCAADPQWKTDSCQGDSGGPLVCSLQGRMTLTGIVSWGSGCALKDKPGVYTRVSHFLPWIRSHTKEENGLAL

SEQ ID NO: 906 - protein, 253 aa, Artificial Sequence
  UROKINASE-TYPE PLASMINOGEN ACTIVATOR (u-PA) protease domain V38D/T39V/V41R/L97bV/H99E/C122S/R217E
IIGGEFTTIENQPWFAAIYRRHRGGSDVYRCGGSLISPCWVISATHCFIDYPKKEDYIVYLGRSRLNSNTQGEMKFEVENLILHKDYSADTVAEHNDIALLKIRSKEGRCAQPSRTIQTISLPSMYNDPQFGTSCEITGFGKENSTDYLYPEQLKMTVVKLISHRECQQPHYYGSEVTTKMLCAADPQWKTDSCQGDSGGPLVCSLQGRMTLTGIVSWGEGCALKDKPGVYTRVSHFLPWIRSHTKEENGLAL

SEQ ID NO: 907 - protein, 253 aa, Artificial Sequence
  UROKINASE-TYPE PLASMINOGEN ACTIVATOR (u-PA) protease domain R37aH/V38D/T39M/Y40A/V41K/L97bR/H99Q/C122S/R217E
IIGGEFTTIENQPWFAAIYRRHHGGSDMAKCGGSLISPCWVISATHCFIDYPKKEDYIVYLGRSRLNSNTQGEMKFEVENLILHKDYSADTRAQHNDIALLKIRSKEGRCAQPSRTIQTISLPSMYNDPQFGTSCEITGFGKENSTDYLYPEQLKMTVVKLISHRECQQPHYYGSEVTTKMLCAADPQWKTDSCQGDSGGPLVCSLQGRMTLTGIVSWGEGCALKDKPGVYTRVSHFLPWIRSHTKEENGLAL

SEQ ID NO: 908 - protein, 253 aa, Artificial Sequence
  UROKINASE-TYPE PLASMINOGEN ACTIVATOR (u-PA) protease domain R36S/V38D/T39H/Y40L/V41R/L97bV/H99V/C122S/R217Q
IIGGEFTTIENQPWFAAIYRSHRGGSDHLRCGGSLISPCWVISATHCFIDYPKKEDYIVYLGRSRLNSNTQGEMKFEVENLILHKDYSADTVAVHNDIALLKIRSKEGRCAQPSRTIQTISLPSMYNDPQFGTSCEITGFGKENSTDYLYPEQLKMTVVKLISHRECQQPHYYGSEVTTKMLCAADPQWKTDSCQGDSGGPLVCSLQGRMTLTGIVSWGQGCALKDKPGVYTRVSHFLPWIRSHTKEENGLAL

SEQ ID NO: 909 - protein, 253 aa, Artificial Sequence
  UROKINASE-TYPE PLASMINOGEN ACTIVATOR (u-PA) protease domain R36S/V38D/T39K/Y40F/V41R/L97bN/H99E/C122S/R217S
IIGGEFTTIENQPWFAAIYRSHRGGSDKFRCGGSLISPCWVISATHCFIDYPKKEDYIVYLGRSRLNSNTQGEMKFEVENLILHKDYSADTNAEHNDIALLKIRSKEGRCAQPSRTIQTISLPSMYNDPQFGTSCEITGFGKENSTDYLYPEQLKMTVVKLISHRECQQPHYYGSEVTTKMLCAADPQWKTDSCQGDSGGPLVCSLQGRMTLTGIVSWGSGCALKDKPGVYTRVSHFLPWIRSHTKEENGLAL

SEQ ID NO: 910 - protein, 253 aa, Artificial Sequence
  UROKINASE-TYPE PLASMINOGEN ACTIVATOR (u-PA) protease domain V38D/T39K/Y40F/V41Q/L97bI/H99S/C122S/R217T
IIGGEFTTIENQPWFAAIYRRHRGGSDKFQCGGSLISPCWVISATHCFIDYPKKEDYIVYLGRSRLNSNTQGEMKFEVENLILHKDYSADTIASHNDIALLKIRSKEGRCAQPSRTIQTISLPSMYNDPQFGTSCEITGFGKENSTDYLYPEQLKMTVVKLISHRECQQPHYYGSEVTTKMLCAADPQWKTDSCQGDSGGPLVCSLQGRMTLTGIVSWGTGCALKDKPGVYTRVSHFLPWIRSHTKEENGLAL

SEQ ID NO: 911 - protein, 253 aa, Artificial Sequence
  UROKINASE-TYPE PLASMINOGEN ACTIVATOR (u-PA) protease domain R36H/V38D/T39R/Y40F/V41R/H99S/C122S/R217T
IIGGEFTTIENQPWFAAIYRHHRGGSDRFRCGGSLISPCWVISATHCFIDYPKKEDYIVYLGRSRLNSNTQGEMKFEVENLILHKDYSADTLASHNDIALLKIRSKEGRCAQPSRTIQTISLPSMYNDPQFGTSCEITGFGKENSTDYLYPEQLKMTVVKLISHRECQQPHYYGSEVTTKMLCAADPQWKTDSCQGDSGGPLVCSLQGRMTLTGIVSWGTGCALKDKPGVYTRVSHFLPWIRSHTKEENGLAL

SEQ ID NO: 912 - protein, 253 aa, Artificial Sequence
  UROKINASE-TYPE PLASMINOGEN ACTIVATOR (u-PA) protease domain R37aP/V38D/T39Y/V41R/L97bV/H99Q/C122S/R217T
IIGGEFTTIENQPWFAAIYRRHPGGSDYYRCGGSLISPCWVISATHCFIDYPKKEDYIVYLGRSRLNSNTQGEMKFEVENLILHKDYSADTVAQHNDIALLKIRSKEGRCAQPSRTIQTISLPSMYNDPQFGTSCEITGFGKENSTDYLYPEQLKMTVVKLISHRECQQPHYYGSEVTTKMLCAADPQWKTDSCQGDSGGPLVCSLQGRMTLTGIVSWGTGCALKDKPGVYTRVSHFLPWIRSHTKEENGLAL

SEQ ID NO: 913 - protein, 253 aa, Artificial Sequence
  UROKINASE-TYPE PLASMINOGEN ACTIVATOR (u-PA) protease domain R36S/V38D/T39K/Y40M/V41K/L97bI/C122S/R217E
IIGGEFTTIENQPWFAAIYRSHRGGSDKMKCGGSLISPCWVISATHCFIDYPKKEDYIVYLGRSRLNSNTQGEMKFEVENLILHKDYSADTIAHHNDIALLKIRSKEGRCAQPSRTIQTISLPSMYNDPQFGTSCEITGFGKENSTDYLYPEQLKMTVVKLISHRECQQPHYYGSEVTTKMLCAADPQWKTDSCQGDSGGPLVCSLQGRMTLTGIVSWGEGCALKDKPGVYTRVSHFLPWIRSHTKEENGLAL

SEQ ID NO: 914 - protein, 253 aa, Artificial Sequence
  UROKINASE-TYPE PLASMINOGEN ACTIVATOR (u-PA) protease domain V38D/T39H/Y40F/V41K/L97bM/H99T/C122S/R217E
IIGGEFTTIENQPWFAAIYRRHRGGSDHFKCGGSLISPCWVISATHCFIDYPKKEDYIVYLGRSRLNSNTQGEMKFEVENLILHKDYSADTMATHNDIALLKIRSKEGRCAQPSRTIQTISLPSMYNDPQFGTSCEITGFGKENSTDYLYPEQLKMTVVKLISHRECQQPHYYGSEVTTKMLCAADPQWKTDSCQGDSGGPLVCSLQGRMTLTGIVSWGEGCALKDKPGVYTRVSHFLPWIRSHTKEENGLAL

SEQ ID NO: 915 - protein, 253 aa, Artificial Sequence
  UROKINASE-TYPE PLASMINOGEN ACTIVATOR (u-PA) protease domain R36S/V38D/T39K/Y40M/V41K/L97bH/H99T/C122S/R217S
IIGGEFTTIENQPWFAAIYRSHRGGSDKMKCGGSLISPCWVISATHCFIDYPKKEDYIVYLGRSRLNSNTQGEMKFEVENLILHKDYSADTHATHNDIALLKIRSKEGRCAQPSRTIQTISLPSMYNDPQFGTSCEITGFGKENSTDYLYPEQLKMTVVKLISHRECQQPHYYGSEVTTKMLCAADPQWKTDSCQGDSGGPLVCSLQGRMTLTGIVSWGSGCALKDKPGVYTRVSHFLPWIRSHTKEENGLAL

SEQ ID NO: 916 - protein, 253 aa, Artificial Sequence
  UROKINASE-TYPE PLASMINOGEN ACTIVATOR (u-PA) protease domain V38D/T39L/Y40L/V41K/L97bH/H99L/C122S/R217A
IIGGEFTTIENQPWFAAIYRRHRGGSDLLKCGGSLISPCWVISATHCFIDYPKKEDYIVYLGRSRLNSNTQGEMKFEVENLILHKDYSADTHALHNDIALLKIRSKEGRCAQPSRTIQTISLPSMYNDPQFGTSCEITGFGKENSTDYLYPEQLKMTVVKLISHRECQQPHYYGSEVTTKMLCAADPQWKTDSCQGDSGGPLVCSLQGRMTLTGIVSWGAGCALKDKPGVYTRVSHFLPWIRSHTKEENGLAL

SEQ ID NO: 917 - protein, 253 aa, Artificial Sequence
  UROKINASE-TYPE PLASMINOGEN ACTIVATOR (u-PA) protease domain V38D/T39F/Y40L/V41K/L97bT/H99S/C122S/R217T
IIGGEFTTIENQPWFAAIYRRHRGGSDFLKCGGSLISPCWVISATHCFIDYPKKEDYIVYLGRSRLNSNTQGEMKFEVENLILHKDYSADTTASHNDIALLKIRSKEGRCAQPSRTIQTISLPSMYNDPQFGTSCEITGFGKENSTDYLYPEQLKMTVVKLISHRECQQPHYYGSEVTTKMLCAADPQWKTDSCQGDSGGPLVCSLQGRMTLTGIVSWGTGCALKDKPGVYTRVSHFLPWIRSHTKEENGLAL

SEQ ID NO: 918 - protein, 253 aa, Artificial Sequence
  UROKINASE-TYPE PLASMINOGEN ACTIVATOR (u-PA) protease domain R36S/V38D/T39A/V41R/L97bV/H99S/C122S/R217T
IIGGEFTTIENQPWFAAIYRSHRGGSDAYRCGGSLISPCWVISATHCFIDYPKKEDYIVYLGRSRLNSNTQGEMKFEVENLILHKDYSADTVASHNDIALLKIRSKEGRCAQPSRTIQTISLPSMYNDPQFGTSCEITGFGKENSTDYLYPEQLKMTVVKLISHRECQQPHYYGSEVTTKMLCAADPQWKTDSCQGDSGGPLVCSLQGRMTLTGIVSWGTGCALKDKPGVYTRVSHFLPWIRSHTKEENGLAL

SEQ ID NO: 919 - protein, 253 aa, Artificial Sequence
  UROKINASE-TYPE PLASMINOGEN ACTIVATOR (u-PA) protease domain R37aH/V38D/T39R/Y40F/L97bT/C122S/R217E
IIGGEFTTIENQPWFAAIYRRHHGGSDRFVCGGSLISPCWVISATHCFIDYPKKEDYIVYLGRSRLNSNTQGEMKFEVENLILHKDYSADTTAHHNDIALLKIRSKEGRCAQPSRTIQTISLPSMYNDPQFGTSCEITGFGKENSTDYLYPEQLKMTVVKLISHRECQQPHYYGSEVTTKMLCAADPQWKTDSCQGDSGGPLVCSLQGRMTLTGIVSWGEGCALKDKPGVYTRVSHFLPWIRSHTKEENGLAL

SEQ ID NO: 920 - protein, 253 aa, Artificial Sequence
  UROKINASE-TYPE PLASMINOGEN ACTIVATOR (u-PA) protease domain R36S/V38D/T39K/Y40F/V41R/L97bI/H99E/C122S/R217S
IIGGEFTTIENQPWFAAIYRSHRGGSDKFRCGGSLISPCWVISATHCFIDYPKKEDYIVYLGRSRLNSNTQGEMKFEVENLILHKDYSADTIAEHNDIALLKIRSKEGRCAQPSRTIQTISLPSMYNDPQFGTSCEITGFGKENSTDYLYPEQLKMTVVKLISHRECQQPHYYGSEVTTKMLCAADPQWKTDSCQGDSGGPLVCSLQGRMTLTGIVSWGSGCALKDKPGVYTRVSHFLPWIRSHTKEENGLAL

SEQ ID NO: 921 - protein, 253 aa, Artificial Sequence
  UROKINASE-TYPE PLASMINOGEN ACTIVATOR (u-PA) protease domain R36S/V38D/T39A/Y40F/V41R/L97bA/H99E/C122S/R217T
IIGGEFTTIENQPWFAAIYRSHRGGSDAFRCGGSLISPCWVISATHCFIDYPKKEDYIVYLGRSRLNSNTQGEMKFEVENLILHKDYSADTAAEHNDIALLKIRSKEGRCAQPSRTIQTISLPSMYNDPQFGTSCEITGFGKENSTDYLYPEQLKMTVVKLISHRECQQPHYYGSEVTTKMLCAADPQWKTDSCQGDSGGPLVCSLQGRMTLTGIVSWGTGCALKDKPGVYTRVSHFLPWIRSHTKEENGLAL

SEQ ID NO: 922 - protein, 253 aa, Artificial Sequence
  UROKINASE-TYPE PLASMINOGEN ACTIVATOR (u-PA) protease domain R35Q/H37Y/R37aE/V38E/T39Y/V41R/L97bG/H99S/C122S
IIGGEFTTIENQPWFAAIYQRYEGGSEYYRCGGSLISPCWVISATHCFIDYPKKEDYIVYLGRSRLNSNTQGEMKFEVENLILHKDYSADTGASHNDIALLKIRSKEGRCAQPSRTIQTISLPSMYNDPQFGTSCEITGFGKENSTDYLYPEQLKMTVVKLISHRECQQPHYYGSEVTTKMLCAADPQWKTDSCQGDSGGPLVCSLQGRMTLTGIVSWGRGCALKDKPGVYTRVSHFLPWIRSHTKEENGLAL

SEQ ID NO: 923 - protein, 253 aa, Artificial Sequence
  UROKINASE-TYPE PLASMINOGEN ACTIVATOR (u-PA) protease domain R37aS/V38D/T39L/Y40L/V41R/L97bM/H99L/C122S/R217S
IIGGEFTTIENQPWFAAIYRRHSGGSDLLRCGGSLISPCWVISATHCFIDYPKKEDYIVYLGRSRLNSNTQGEMKFEVENLILHKDYSADTMALHNDIALLKIRSKEGRCAQPSRTIQTISLPSMYNDPQFGTSCEITGFGKENSTDYLYPEQLKMTVVKLISHRECQQPHYYGSEVTTKMLCAADPQWKTDSCQGDSGGPLVCSLQGRMTLTGIVSWGSGCALKDKPGVYTRVSHFLPWIRSHTKEENGLAL

SEQ ID NO: 924 - protein, 253 aa, Artificial Sequence
  UROKINASE-TYPE PLASMINOGEN ACTIVATOR (u-PA) protease domain R36S/V38D/T39L/Y40L/V41R/L97bI/H99E/C122S/R217T
IIGGEFTTIENQPWFAAIYRSHRGGSDLLRCGGSLISPCWVISATHCFIDYPKKEDYIVYLGRSRLNSNTQGEMKFEVENLILHKDYSADTIAEHNDIALLKIRSKEGRCAQPSRTIQTISLPSMYNDPQFGTSCEITGFGKENSTDYLYPEQLKMTVVKLISHRECQQPHYYGSEVTTKMLCAADPQWKTDSCQGDSGGPLVCSLQGRMTLTGIVSWGTGCALKDKPGVYTRVSHFLPWIRSHTKEENGLAL

SEQ ID NO: 925 - protein, 253 aa, Artificial Sequence
  UROKINASE-TYPE PLASMINOGEN ACTIVATOR (u-PA) protease domain R37aS/V38D/T39Y/Y40F/V41R/H99L/C122S/R217T
IIGGEFTTIENQPWFAAIYRRHSGGSDYFRCGGSLISPCWVISATHCFIDYPKKEDYIVYLGRSRLNSNTQGEMKFEVENLILHKDYSADTLALHNDIALLKIRSKEGRCAQPSRTIQTISLPSMYNDPQFGTSCEITGFGKENSTDYLYPEQLKMTVVKLISHRECQQPHYYGSEVTTKMLCAADPQWKTDSCQGDSGGPLVCSLQGRMTLTGIVSWGTGCALKDKPGVYTRVSHFLPWIRSHTKEENGLAL

SEQ ID NO: 926 - protein, 253 aa, Artificial Sequence
  UROKINASE-TYPE PLASMINOGEN ACTIVATOR (u-PA) protease domain V38D/T39Y/Y40L/V41R/L97bI/H99E/C122S/R217E
IIGGEFTTIENQPWFAAIYRRHRGGSDYLRCGGSLISPCWVISATHCFIDYPKKEDYIVYLGRSRLNSNTQGEMKFEVENLILHKDYSADTIAEHNDIALLKIRSKEGRCAQPSRTIQTISLPSMYNDPQFGTSCEITGFGKENSTDYLYPEQLKMTVVKLISHRECQQPHYYGSEVTTKMLCAADPQWKTDSCQGDSGGPLVCSLQGRMTLTGIVSWGEGCALKDKPGVYTRVSHFLPWIRSHTKEENGLAL

SEQ ID NO: 927 - protein, 253 aa, Artificial Sequence
  UROKINASE-TYPE PLASMINOGEN ACTIVATOR (u-PA) protease domain R37aP/V38D/T39L/Y40I/V41R/H99L/C122S/R217Q
IIGGEFTTIENQPWFAAIYRRHPGGSDLIRCGGSLISPCWVISATHCFIDYPKKEDYIVYLGRSRLNSNTQGEMKFEVENLILHKDYSADTLALHNDIALLKIRSKEGRCAQPSRTIQTISLPSMYNDPQFGTSCEITGFGKENSTDYLYPEQLKMTVVKLISHRECQQPHYYGSEVTTKMLCAADPQWKTDSCQGDSGGPLVCSLQGRMTLTGIVSWGQGCALKDKPGVYTRVSHFLPWIRSHTKEENGLAL

SEQ ID NO: 928 - protein, 253 aa, Artificial Sequence
  UROKINASE-TYPE PLASMINOGEN ACTIVATOR (u-PA) protease domain V38D/T39V/Y40L/V41S/H99V/C122S/R217V
IIGGEFTTIENQPWFAAIYRRHRGGSDVLSCGGSLISPCWVISATHCFIDYPKKEDYIVYLGRSRLNSNTQGEMKFEVENLILHKDYSADTLAVHNDIALLKIRSKEGRCAQPSRTIQTISLPSMYNDPQFGTSCEITGFGKENSTDYLYPEQLKMTVVKLISHRECQQPHYYGSEVTTKMLCAADPQWKTDSCQGDSGGPLVCSLQGRMTLTGIVSWGVGCALKDKPGVYTRVSHFLPWIRSHTKEENGLAL

SEQ ID NO: 929 - protein, 253 aa, Artificial Sequence
  UROKINASE-TYPE PLASMINOGEN ACTIVATOR (u-PA) protease domain R37aS/V38D/T39V/V41E/L97bG/H99Q/C122S/R217T
IIGGEFTTIENQPWFAAIYRRHSGGSDVYECGGSLISPCWVISATHCFIDYPKKEDYIVYLGRSRLNSNTQGEMKFEVENLILHKDYSADTGAQHNDIALLKIRSKEGRCAQPSRTIQTISLPSMYNDPQFGTSCEITGFGKENSTDYLYPEQLKMTVVKLISHRECQQPHYYGSEVTTKMLCAADPQWKTDSCQGDSGGPLVCSLQGRMTLTGIVSWGTGCALKDKPGVYTRVSHFLPWIRSHTKEENGLAL

SEQ ID NO: 930 - protein, 253 aa, Artificial Sequence
  UROKINASE-TYPE PLASMINOGEN ACTIVATOR (u-PA) protease domain R36S/V38D/T39S/V41R/L97bI/H99E/C122S/R217T
IIGGEFTTIENQPWFAAIYRSHRGGSDSYRCGGSLISPCWVISATHCFIDYPKKEDYIVYLGRSRLNSNTQGEMKFEVENLILHKDYSADTIAEHNDIALLKIRSKEGRCAQPSRTIQTISLPSMYNDPQFGTSCEITGFGKENSTDYLYPEQLKMTVVKLISHRECQQPHYYGSEVTTKMLCAADPQWKTDSCQGDSGGPLVCSLQGRMTLTGIVSWGTGCALKDKPGVYTRVSHFLPWIRSHTKEENGLAL

SEQ ID NO: 931 - protein, 253 aa, Artificial Sequence
  UROKINASE-TYPE PLASMINOGEN ACTIVATOR (u-PA) protease domain R37aS/V38D/T39G/V41R/L97bM/H99E/C122S/R217S
IIGGEFTTIENQPWFAAIYRRHSGGSDGYRCGGSLISPCWVISATHCFIDYPKKEDYIVYLGRSRLNSNTQGEMKFEVENLILHKDYSADTMAEHNDIALLKIRSKEGRCAQPSRTIQTISLPSMYNDPQFGTSCEITGFGKENSTDYLYPEQLKMTVVKLISHRECQQPHYYGSEVTTKMLCAADPQWKTDSCQGDSGGPLVCSLQGRMTLTGIVSWGSGCALKDKPGVYTRVSHFLPWIRSHTKEENGLAL

SEQ ID NO: 932 - protein, 253 aa, Artificial Sequence
  UROKINASE-TYPE PLASMINOGEN ACTIVATOR (u-PA) protease domain R37aS/V38D/T39Y/V41R/L97bI/H99E/C122S/R217T
IIGGEFTTIENQPWFAAIYRRHSGGSDYYRCGGSLISPCWVISATHCFIDYPKKEDYIVYLGRSRLNSNTQGEMKFEVENLILHKDYSADTIAEHNDIALLKIRSKEGRCAQPSRTIQTISLPSMYNDPQFGTSCEITGFGKENSTDYLYPEQLKMTVVKLISHRECQQPHYYGSEVTTKMLCAADPQWKTDSCQGDSGGPLVCSLQGRMTLTGIVSWGTGCALKDKPGVYTRVSHFLPWIRSHTKEENGLAL

SEQ ID NO: 933 - protein, 253 aa, Artificial Sequence
  UROKINASE-TYPE PLASMINOGEN ACTIVATOR (u-PA) protease domain R35E/R37aD/V38E/Y40Q/V41L/Y60bN/L97bA/H99Q/C122S/Y 149R
IIGGEFTTIENQPWFAAIYERHDGGSETQLCGGSLISPCWVISATHCFIDNPKKEDYIVYLGRSRLNSNTQGEMKFEVENLILHKDYSADTAAQHNDIALLKIRSKEGRCAQPSRTIQTISLPSMYNDPQFGTSCEITGFGKENSTDRLYPEQLKMTVVKLISHRECQQPHYYGSEVTTKMLCAADPQWKTDSCQGDSGGPLVCSLQGRMTLTGIVSWGRGCALKDKPGVYTRVSHFLPWIRSHTKEENGLAL

SEQ ID NO: 934 - protein, 253 aa, Artificial Sequence
  UROKINASE-TYPE PLASMINOGEN ACTIVATOR (u-PA) protease domain R35S/R37aD/V38E/Y40Q/V41L/L97bA/H99Q/C122S/Y149R
IIGGEFTTIENQPWFAAIYSRHDGGSETQLCGGSLISPCWVISATHCFIDYPKKEDYIVYLGRSRLNSNTQGEMKFEVENLILHKDYSADTAAQHNDIALLKIRSKEGRCAQPSRTIQTISLPSMYNDPQFGTSCEITGFGKENSTDRLYPEQLKMTVVKLISHRECQQPHYYGSEVTTKMLCAADPQWKTDSCQGDSGGPLVCSLQGRMTLTGIVSWGRGCALKDKPGVYTRVSHFLPWIRSHTKEENGLAL

SEQ ID NO: 935 - protein, 253 aa, Artificial Sequence
  UROKINASE-TYPE PLASMINOGEN ACTIVATOR (u-PA) protease domain R35V/R37aD/V38E/Y40Q/V41L/Y60bG/T97aE/L97bA/H99Q/C 122S/Y149R
IIGGEFTTIENQPWFAAIYVRHDGGSETQLCGGSLISPCWVISATHCFIDGPKKEDYIVYLGRSRLNSNTQGEMKFEVENLILHKDYSADEAAQHNDIALLKIRSKEGRCAQPSRTIQTISLPSMYNDPQFGTSCEITGFGKENSTDRLYPEQLKMTVVKLISHRECQQPHYYGSEVTTKMLCAADPQWKTDSCQGDSGGPLVCSLQGRMTLTGIVSWGRGCALKDKPGVYTRVSHFLPWIRSHTKEENGLAL

SEQ ID NO: 936 - protein, 253 aa, Artificial Sequence
  UROKINASE-TYPE PLASMINOGEN ACTIVATOR (u-PA) protease domain R35S/R37aD/V38E/Y40Q/V41L/Y60bV/T97aL/L97bA/H99Q/C 122S/Y149L
IIGGEFTTIENQPWFAAIYSRHDGGSETQLCGGSLISPCWVISATHCFIDVPKKEDYIVYLGRSRLNSNTQGEMKFEVENLILHKDYSADLAAQHNDIALLKIRSKEGRCAQPSRTIQTISLPSMYNDPQFGTSCEITGFGKENSTDLLYPEQLKMTVVKLISHRECQQPHYYGSEVTTKMLCAADPQWKTDSCQGDSGGPLVCSLQGRMTLTGIVSWGRGCALKDKPGVYTRVSHFLPWIRSHTKEENGLAL

SEQ ID NO: 937 - protein, 253 aa, Artificial Sequence
  UROKINASE-TYPE PLASMINOGEN ACTIVATOR (u-PA) protease domain R37aP/V38E/Y40Q/V41L/Y60bE/L97bA/H99Q/C122S/Y149R
IIGGEFTTIENQPWFAAIYRRHPGGSETQLCGGSLISPCWVISATHCFIDEPKKEDYIVYLGRSRLNSNTQGEMKFEVENLILHKDYSADTAAQHNDIALLKIRSKEGRCAQPSRTIQTISLPSMYNDPQFGTSCEITGFGKENSTDRLYPEQLKMTVVKLISHRECQQPHYYGSEVTTKMLCAADPQWKTDSCQGDSGGPLVCSLQGRMTLTGIVSWGRGCALKDKPGVYTRVSHFLPWIRSHTKEENGLAL

SEQ ID NO: 938 - protein, 253 aa, Artificial Sequence
  UROKINASE-TYPE PLASMINOGEN ACTIVATOR (u-PA) protease domain R35M/R37aQ/V38E/Y40Q/V41L/Y60bE/T97aE/L97bA/H99Q/C 122S/Y149R
IIGGEFTTIENQPWFAAIYMRHQGGSETQLCGGSLISPCWVISATHCFIDEPKKEDYIVYLGRSRLNSNTQGEMKFEVENLILHKDYSADEAAQHNDIALLKIRSKEGRCAQPSRTIQTISLPSMYNDPQFGTSCEITGFGKENSTDRLYPEQLKMTVVKLISHRECQQPHYYGSEVTTKMLCAADPQWKTDSCQGDSGGPLVCSLQGRMTLTGIVSWGRGCALKDKPGVYTRVSHFLPWIRSHTKEENGLAL

SEQ ID NO: 939 - protein, 253 aa, Artificial Sequence
  UROKINASE-TYPE PLASMINOGEN ACTIVATOR (u-PA) protease domain R35S/R37aD/V38E/Y40Q/V41L/Y60bT/T97aE/L97bA/H99Q/C 122S/Y149R
IIGGEFTTIENQPWFAAIYSRHDGGSETQLCGGSLISPCWVISATHCFIDTPKKEDYIVYLGRSRLNSNTQGEMKFEVENLILHKDYSADEAAQHNDIALLKIRSKEGRCAQPSRTIQTISLPSMYNDPQFGTSCEITGFGKENSTDRLYPEQLKMTVVKLISHRECQQPHYYGSEVTTKMLCAADPQWKTDSCQGDSGGPLVCSLQGRMTLTGIVSWGRGCALKDKPGVYTRVSHFLPWIRSHTKEENGLAL

SEQ ID NO: 940 - protein, 253 aa, Artificial Sequence
  UROKINASE-TYPE PLASMINOGEN ACTIVATOR (u-PA) protease domain R35S/R37aA/V38E/Y40Q/V41L/L97bA/H99Q/C122S/Y149V
IIGGEFTTIENQPWFAAIYSRHAGGSETQLCGGSLISPCWVISATHCFIDYPKKEDYIVYLGRSRLNSNTQGEMKFEVENLILHKDYSADTAAQHNDIALLKIRSKEGRCAQPSRTIQTISLPSMYNDPQFGTSCEITGFGKENSTDVLYPEQLKMTVVKLISHRECQQPHYYGSEVTTKMLCAADPQWKTDSCQGDSGGPLVCSLQGRMTLTGIVSWGRGCALKDKPGVYTRVSHFLPWIRSHTKEENGLAL

SEQ ID NO: 941 - protein, 253 aa, Artificial Sequence
  UROKINASE-TYPE PLASMINOGEN ACTIVATOR (u-PA) protease domain R35K/R37aD/V38E/Y40Q/V41L/Y60bE/L97bA/H99Q/C122S/Y 149R
IIGGEFTTIENQPWFAAIYKRHDGGSETQLCGGSLISPCWVISATHCFIDEPKKEDYIVYLGRSRLNSNTQGEMKFEVENLILHKDYSADTAAQHNDIALLKIRSKEGRCAQPSRTIQTISLPSMYNDPQFGTSCEITGFGKENSTDRLYPEQLKMTVVKLISHRECQQPHYYGSEVTTKMLCAADPQWKTDSCQGDSGGPLVCSLQGRMTLTGIVSWGRGCALKDKPGVYTRVSHFLPWIRSHTKEENGLAL

SEQ ID NO: 942 - protein, 253 aa, Artificial Sequence
  UROKINASE-TYPE PLASMINOGEN ACTIVATOR (u-PA) protease domain R35V/R37aE/V38E/Y40Q/V41L/Y60bS/T97aE/L97bA/H99Q/C 122S/Y149R
IIGGEFTTIENQPWFAAIYVRHEGGSETQLCGGSLISPCWVISATHCFIDSPKKEDYIVYLGRSRLNSNTQGEMKFEVENLILHKDYSADEAAQHNDIALLKIRSKEGRCAQPSRTIQTISLPSMYNDPQFGTSCEITGFGKENSTDRLYPEQLKMTVVKLISHRECQQPHYYGSEVTTKMLCAADPQWKTDSCQGDSGGPLVCSLQGRMTLTGIVSWGRGCALKDKPGVYTRVSHFLPWIRSHTKEENGLAL

SEQ ID NO: 943 - protein, 253 aa, Artificial Sequence
  UROKINASE-TYPE PLASMINOGEN ACTIVATOR (u-PA) protease domain R35A/R37aE/V38E/Y40Q/V41L/L97bA/H99Q/C122S/Y149R
IIGGEFTTIENQPWFAAIYARHEGGSETQLCGGSLISPCWVISATHCFIDYPKKEDYIVYLGRSRLNSNTQGEMKFEVENLILHKDYSADTAAQHNDIALLKIRSKEGRCAQPSRTIQTISLPSMYNDPQFGTSCEITGFGKENSTDRLYPEQLKMTVVKLISHRECQQPHYYGSEVTTKMLCAADPQWKTDSCQGDSGGPLVCSLQGRMTLTGIVSWGRGCALKDKPGVYTRVSHFLPWIRSHTKEENGLAL

SEQ ID NO: 944 - protein, 253 aa, Artificial Sequence
  UROKINASE-TYPE PLASMINOGEN ACTIVATOR (u-PA) protease domain R37aD/V38E/Y40Q/V41L/Y60bP/T97aE/L97bA/H99Q/C122S/ Y149R
IIGGEFTTIENQPWFAAIYRRHDGGSETQLCGGSLISPCWVISATHCFIDPPKKEDYIVYLGRSRLNSNTQGEMKFEVENLILHKDYSADEAAQHNDIALLKIRSKEGRCAQPSRTIQTISLPSMYNDPQFGTSCEITGFGKENSTDRLYPEQLKMTVVKLISHRECQQPHYYGSEVTTKMLCAADPQWKTDSCQGDSGGPLVCSLQGRMTLTGIVSWGRGCALKDKPGVYTRVSHFLPWIRSHTKEENGLAL

SEQ ID NO: 945 - protein, 253 aa, Artificial Sequence
  UROKINASE-TYPE PLASMINOGEN ACTIVATOR (u-PA) protease domain R35S/R37aD/V38E/Y40Q/V41L/T97aD/L97bA/H99Q/C122S/Y 149K
IIGGEFTTIENQPWFAAIYSRHDGGSETQLCGGSLISPCWVISATHCFIDYPKKEDYIVYLGRSRLNSNTQGEMKFEVENLILHKDYSADDAAQHNDIALLKIRSKEGRCAQPSRTIQTISLPSMYNDPQFGTSCEITGFGKENSTDKLYPEQLKMTVVKLISHRECQQPHYYGSEVTTKMLCAADPQWKTDSCQGDSGGPLVCSLQGRMTLTGIVSWGRGCALKDKPGVYTRVSHFLPWIRSHTKEENGLAL

SEQ ID NO: 946 - protein, 253 aa, Artificial Sequence
  UROKINASE-TYPE PLASMINOGEN ACTIVATOR (u-PA) protease domain R35A/R37aD/V38E/Y40Q/V41L/Y60bV/T97aE/L97bA/H99Q/C 122S/Y149K
IIGGEFTTIENQPWFAAIYARHDGGSETQLCGGSLISPCWVISATHCFIDVPKKEDYIVYLGRSRLNSNTQGEMKFEVENLILHKDYSADEAAQHNDIALLKIRSKEGRCAQPSRTIQTISLPSMYNDPQFGTSCEITGFGKENSTDKLYPEQLKMTVVKLISHRECQQPHYYGSEVTTKMLCAADPQWKTDSCQGDSGGPLVCSLQGRMTLTGIVSWGRGCALKDKPGVYTRVSHFLPWIRSHTKEENGLAL

SEQ ID NO: 947 - protein, 253 aa, Artificial Sequence
  UROKINASE-TYPE PLASMINOGEN ACTIVATOR (u-PA) protease domain R37aD/V38E/Y40Q/V41L/Y60bP/T97aV/L97bA/H99Q/C122S/ Y149K
IIGGEFTTIENQPWFAAIYRRHDGGSETQLCGGSLISPCWVISATHCFIDPPKKEDYIVYLGRSRLNSNTQGEMKFEVENLILHKDYSADVAAQHNDIALLKIRSKEGRCAQPSRTIQTISLPSMYNDPQFGTSCEITGFGKENSTDKLYPEQLKMTVVKLISHRECQQPHYYGSEVTTKMLCAADPQWKTDSCQGDSGGPLVCSLQGRMTLTGIVSWGRGCALKDKPGVYTRVSHFLPWIRSHTKEENGLAL

SEQ ID NO: 948 - protein, 253 aa, Artificial Sequence
  UROKINASE-TYPE PLASMINOGEN ACTIVATOR (u-PA) protease domain R35S/R37aD/V38E/Y40Q/V41L/T97aE/L97bA/H99Q/C122S/Y 149R
IIGGEFTTIENQPWFAAIYSRHDGGSETQLCGGSLISPCWVISATHCFIDYPKKEDYIVYLGRSRLNSNTQGEMKFEVENLILHKDYSADEAAQHNDIALLKIRSKEGRCAQPSRTIQTISLPSMYNDPQFGTSCEITGFGKENSTDRLYPEQLKMTVVKLISHRECQQPHYYGSEVTTKMLCAADPQWKTDSCQGDSGGPLVCSLQGRMTLTGIVSWGRGCALKDKPGVYTRVSHFLPWIRSHTKEENGLAL

SEQ ID NO: 949 - protein, 253 aa, Artificial Sequence
  UROKINASE-TYPE PLASMINOGEN ACTIVATOR (u-PA) protease domain R37aS/V38E/Y40V/V41R/H99L/C122S/Y151L/R217V
IIGGEFTTIENQPWFAAIYRRHSGGSETVRCGGSLISPCWVISATHCFIDYPKKEDYIVYLGRSRLNSNTQGEMKFEVENLILHKDYSADTLALHNDIALLKIRSKEGRCAQPSRTIQTISLPSMYNDPQFGTSCEITGFGKENSTDYLLPEQLKMTVVKLISHRECQQPHYYGSEVTTKMLCAADPQWKTDSCQGDSGGPLVCSLQGRMTLTGIVSWGVGCALKDKPGVYTRVSHFLPWIRSHTKEENGLAL

SEQ ID NO: 950 - protein, 253 aa, Artificial Sequence
  UROKINASE-TYPE PLASMINOGEN ACTIVATOR (u-PA) protease domain V38E/Y40L/V41R/H99L/C122S/Y151L/R217S
IIGGEFTTIENQPWFAAIYRRHRGGSETLRCGGSLISPCWVISATHCFIDYPKKEDYIVYLGRSRLNSNTQGEMKFEVENLILHKDYSADTLALHNDIALLKIRSKEGRCAQPSRTIQTISLPSMYNDPQFGTSCEITGFGKENSTDYLLPEQLKMTVVKLISHRECQQPHYYGSEVTTKMLCAADPQWKTDSCQGDSGGPLVCSLQGRMTLTGIVSWGSGCALKDKPGVYTRVSHFLPWIRSHTKEENGLAL

SEQ ID NO: 951 - protein, 253 aa, Artificial Sequence
  UROKINASE-TYPE PLASMINOGEN ACTIVATOR (u-PA) protease domain R36L/V38E/Y40Q/V41R/L97bG/H99Q/C122S/Y151P/R217S
IIGGEFTTIENQPWFAAIYRLHRGGSETQRCGGSLISPCWVISATHCFIDYPKKEDYIVYLGRSRLNSNTQGEMKFEVENLILHKDYSADTGAQHNDIALLKIRSKEGRCAQPSRTIQTISLPSMYNDPQFGTSCEITGFGKENSTDYLPPEQLKMTVVKLISHRECQQPHYYGSEVTTKMLCAADPQWKTDSCQGDSGGPLVCSLQGRMTLTGIVSWGSGCALKDKPGVYTRVSHFLPWIRSHTKEENGLAL

SEQ ID NO: 952 - protein, 253 aa, Artificial Sequence
  UROKINASE-TYPE PLASMINOGEN ACTIVATOR (u-PA) protease domain R37aS/V38E/V41R/L97bG/H99Q/C122S/R217V
IIGGEFTTIENQPWFAAIYRRHSGGSETYRCGGSLISPCWVISATHCFIDYPKKEDYIVYLGRSRLNSNTQGEMKFEVENLILHKDYSADTGAQHNDIALLKIRSKEGRCAQPSRTIQTISLPSMYNDPQFGTSCEITGFGKENSTDYLYPEQLKMTVVKLISHRECQQPHYYGSEVTTKMLCAADPQWKTDSCQGDSGGPLVCSLQGRMTLTGIVSWGVGCALKDKPGVYTRVSHFLPWIRSHTKEENGLAL

SEQ ID NO: 953 - protein, 253 aa, Artificial Sequence
  UROKINASE-TYPE PLASMINOGEN ACTIVATOR (u-PA) protease domain V38E/Y40A/V41L/L97bG/H99Q/C122S/R217T
IIGGEFTTIENQPWFAAIYRRHRGGSETALCGGSLISPCWVISATHCFIDYPKKEDYIVYLGRSRLNSNTQGEMKFEVENLILHKDYSADTGAQHNDIALLKIRSKEGRCAQPSRTIQTISLPSMYNDPQFGTSCEITGFGKENSTDYLYPEQLKMTVVKLISHRECQQPHYYGSEVTTKMLCAADPQWKTDSCQGDSGGPLVCSLQGRMTLTGIVSWGTGCALKDKPGVYTRVSHFLPWIRSHTKEENGLAL

SEQ ID NO: 954 - protein, 253 aa, Artificial Sequence
  UROKINASE-TYPE PLASMINOGEN ACTIVATOR (u-PA) protease domain V38E/Y40H/V41Q/L97bG/H99Q/C122S/R217T
IIGGEFTTIENQPWFAAIYRRHRGGSETHQCGGSLISPCWVISATHCFIDYPKKEDYIVYLGRSRLNSNTQGEMKFEVENLILHKDYSADTGAQHNDIALLKIRSKEGRCAQPSRTIQTISLPSMYNDPQFGTSCEITGFGKENSTDYLYPEQLKMTVVKLISHRECQQPHYYGSEVTTKMLCAADPQWKTDSCQGDSGGPLVCSLQGRMTLTGIVSWGTGCALKDKPGVYTRVSHFLPWIRSHTKEENGLAL

SEQ ID NO: 955 - protein, 253 aa, Artificial Sequence
  UROKINASE-TYPE PLASMINOGEN ACTIVATOR (u-PA) protease domain V38E/Y40H/V41T/L97bG/H99Q/C122S/R217T
IIGGEFTTIENQPWFAAIYRRHRGGSETHTCGGSLISPCWVISATHCFIDYPKKEDYIVYLGRSRLNSNTQGEMKFEVENLILHKDYSADTGAQHNDIALLKIRSKEGRCAQPSRTIQTISLPSMYNDPQFGTSCEITGFGKENSTDYLYPEQLKMTVVKLISHRECQQPHYYGSEVTTKMLCAADPQWKTDSCQGDSGGPLVCSLQGRMTLTGIVSWGTGCALKDKPGVYTRVSHFLPWIRSHTKEENGLAL

SEQ ID NO: 956 - protein, 253 aa, Artificial Sequence
  UROKINASE-TYPE PLASMINOGEN ACTIVATOR (u-PA) protease domain V38E/Y40Q/V41L/L97bG/H99Q/C122S/Y151P/R217T
IIGGEFTTIENQPWFAAIYRRHRGGSETQLCGGSLISPCWVISATHCFIDYPKKEDYIVYLGRSRLNSNTQGEMKFEVENLILHKDYSADTGAQHNDIALLKIRSKEGRCAQPSRTIQTISLPSMYNDPQFGTSCEITGFGKENSTDYLPPEQLKMTVVKLISHRECQQPHYYGSEVTTKMLCAADPQWKTDSCQGDSGGPLVCSLQGRMTLTGIVSWGTGCALKDKPGVYTRVSHFLPWIRSHTKEENGLAL

SEQ ID NO: 957 - protein, 253 aa, Artificial Sequence
  UROKINASE-TYPE PLASMINOGEN ACTIVATOR (u-PA) protease domain V38E/Y40Q/V41L/L97bG/H99Q/C122S/R217T
IIGGEFTTIENQPWFAAIYRRHRGGSETQLCGGSLISPCWVISATHCFIDYPKKEDYIVYLGRSRLNSNTQGEMKFEVENLILHKDYSADTGAQHNDIALLKIRSKEGRCAQPSRTIQTISLPSMYNDPQFGTSCEITGFGKENSTDYLYPEQLKMTVVKLISHRECQQPHYYGSEVTTKMLCAADPQWKTDSCQGDSGGPLVCSLQGRMTLTGIVSWGTGCALKDKPGVYTRVSHFLPWIRSHTKEENGLAL

SEQ ID NO: 958 - protein, 253 aa, Artificial Sequence
  UROKINASE-TYPE PLASMINOGEN ACTIVATOR (u-PA) protease domain R36S/V38E/Y40Q/V41R/L97bG/H99L/C122S/Y151P/R217E
IIGGEFTTIENQPWFAAIYRSHRGGSETQRCGGSLISPCWVISATHCFIDYPKKEDYIVYLGRSRLNSNTQGEMKFEVENLILHKDYSADTGALHNDIALLKIRSKEGRCAQPSRTIQTISLPSMYNDPQFGTSCEITGFGKENSTDYLPPEQLKMTVVKLISHRECQQPHYYGSEVTTKMLCAADPQWKTDSCQGDSGGPLVCSLQGRMTLTGIVSWGEGCALKDKPGVYTRVSHFLPWIRSHTKEENGLAL

SEQ ID NO: 959 - protein, 253 aa, Artificial Sequence
  UROKINASE-TYPE PLASMINOGEN ACTIVATOR (u-PA) protease domain V38E/Y40P/V41L/L97bG/H99L/C122S/Y151Q/R217E
IIGGEFTTIENQPWFAAIYRRHRGGSETPLCGGSLISPCWVISATHCFIDYPKKEDYIVYLGRSRLNSNTQGEMKFEVENLILHKDYSADTGALHNDIALLKIRSKEGRCAQPSRTIQTISLPSMYNDPQFGTSCEITGFGKENSTDYLQPEQLKMTVVKLISHRECQQPHYYGSEVTTKMLCAADPQWKTDSCQGDSGGPLVCSLQGRMTLTGIVSWGEGCALKDKPGVYTRVSHFLPWIRSHTKEENGLAL

SEQ ID NO: 960 - protein, 253 aa, Artificial Sequence
  UROKINASE-TYPE PLASMINOGEN ACTIVATOR (u-PA) protease domain R37aS/V38E/Y40H/V41T/L97bG/H99Q/C122S/R217T
IIGGEFTTIENQPWFAAIYRRHSGGSETHTCGGSLISPCWVISATHCFIDYPKKEDYIVYLGRSRLNSNTQGEMKFEVENLILHKDYSADTGAQHNDIALLKIRSKEGRCAQPSRTIQTISLPSMYNDPQFGTSCEITGFGKENSTDYLYPEQLKMTVVKLISHRECQQPHYYGSEVTTKMLCAADPQWKTDSCQGDSGGPLVCSLQGRMTLTGIVSWGTGCALKDKPGVYTRVSHFLPWIRSHTKEENGLAL

SEQ ID NO: 961 - protein, 253 aa, Artificial Sequence
  UROKINASE-TYPE PLASMINOGEN ACTIVATOR (u-PA) protease domain R37aS/V38E/Y40P/V41L/L97bG/H99Q/C122S/Y151Q/R217T
IIGGEFTTIENQPWFAAIYRRHSGGSETPLCGGSLISPCWVISATHCFIDYPKKEDYIVYLGRSRLNSNTQGEMKFEVENLILHKDYSADTGAQHNDIALLKIRSKEGRCAQPSRTIQTISLPSMYNDPQFGTSCEITGFGKENSTDYLQPEQLKMTVVKLISHRECQQPHYYGSEVTTKMLCAADPQWKTDSCQGDSGGPLVCSLQGRMTLTGIVSWGTGCALKDKPGVYTRVSHFLPWIRSHTKEENGLAL

SEQ ID NO: 962 - protein, 253 aa, Artificial Sequence
  UROKINASE-TYPE PLASMINOGEN ACTIVATOR (u-PA) protease domain R37aS/V38E/Y40Q/V41L/L97bG/C122S/Y151P/R217T
IIGGEFTTIENQPWFAAIYRRHSGGSETQLCGGSLISPCWVISATHCFIDYPKKEDYIVYLGRSRLNSNTQGEMKFEVENLILHKDYSADTGAHHNDIALLKIRSKEGRCAQPSRTIQTISLPSMYNDPQFGTSCEITGFGKENSTDYLPPEQLKMTVVKLISHRECQQPHYYGSEVTTKMLCAADPQWKTDSCQGDSGGPLVCSLQGRMTLTGIVSWGTGCALKDKPGVYTRVSHFLPWIRSHTKEENGLAL

SEQ ID NO: 963 - protein, 253 aa, Artificial Sequence
  UROKINASE-TYPE PLASMINOGEN ACTIVATOR (u-PA) protease domain R36S/V38E/Y40L/V41N/L97bG/H99Q/C122S/Y151L/R217T
IIGGEFTTIENQPWFAAIYRSHRGGSETLNCGGSLISPCWVISATHCFIDYPKKEDYIVYLGRSRLNSNTQGEMKFEVENLILHKDYSADTGAQHNDIALLKIRSKEGRCAQPSRTIQTISLPSMYNDPQFGTSCEITGFGKENSTDYLLPEQLKMTVVKLISHRECQQPHYYGSEVTTKMLCAADPQWKTDSCQGDSGGPLVCSLQGRMTLTGIVSWGTGCALKDKPGVYTRVSHFLPWIRSHTKEENGLAL

SEQ ID NO: 964 - protein, 253 aa, Artificial Sequence
  UROKINASE-TYPE PLASMINOGEN ACTIVATOR (u-PA) protease domain R35S/V38E/L97bR/C122S/Y151L/R217V/H241N
IIGGEFTTIENQPWFAAIYSRHRGGSETYVCGGSLISPCWVISATHCFIDYPKKEDYIVYLGRSRLNSNTQGEMKFEVENLILHKDYSADTRAHHNDIALLKIRSKEGRCAQPSRTIQTISLPSMYNDPQFGTSCEITGFGKENSTDYLLPEQLKMTVVKLISHRECQQPHYYGSEVTTKMLCAADPQWKTDSCQGDSGGPLVCSLQGRMTLTGIVSWGVGCALKDKPGVYTRVSHFLPWIRSNTKEENGLAL

SEQ ID NO: 965 - protein, 253 aa, Artificial Sequence
  UROKINASE-TYPE PLASMINOGEN ACTIVATOR (u-PA) protease domain R35S/V38E/H99Q/C122S/S146F/Y151L/V159L/K179N/Q192R /R217V/T242S
IIGGEFTTIENQPWFAAIYSRHRGGSETYVCGGSLISPCWVISATHCFIDYPKKEDYIVYLGRSRLNSNTQGEMKFEVENLILHKDYSADTLAQHNDIALLKIRSKEGRCAQPSRTIQTISLPSMYNDPQFGTSCEITGFGKENFTDYLLPEQLKMTLVKLISHRECQQPHYYGSEVTTNMLCAADPQWKTDSCRGDSGGPLVCSLQGRMTLTGIVSWGVGCALKDKPGVYTRVSHFLPWIRSHSKEENGLAL

SEQ ID NO: 966 - protein, 253 aa, Artificial Sequence
  UROKINASE-TYPE PLASMINOGEN ACTIVATOR (u-PA) protease domain F30Y/R37aH/V38E/H99Q/C122S/Y151L/R217V
IIGGEFTTIENQPWYAAIYRRHHGGSETYVCGGSLISPCWVISATHCFIDYPKKEDYIVYLGRSRLNSNTQGEMKFEVENLILHKDYSADTLAQHNDIALLKIRSKEGRCAQPSRTIQTISLPSMYNDPQFGTSCEITGFGKENSTDYLLPEQLKMTVVKLISHRECQQPHYYGSEVTTKMLCAADPQWKTDSCQGDSGGPLVCSLQGRMTLTGIVSWGVGCALKDKPGVYTRVSHFLPWIRSHTKEENGLAL

SEQ ID NO: 967 - protein, 253 aa, Artificial Sequence
  UROKINASE-TYPE PLASMINOGEN ACTIVATOR (u-PA) protease domain R35H/V38E/L97bR/C122S/Y151L/R217V
IIGGEFTTIENQPWFAAIYHRHRGGSETYVCGGSLISPCWVISATHCFIDYPKKEDYIVYLGRSRLNSNTQGEMKFEVENLILHKDYSADTRAHHNDIALLKIRSKEGRCAQPSRTIQTISLPSMYNDPQFGTSCEITGFGKENSTDYLLPEQLKMTVVKLISHRECQQPHYYGSEVTTKMLCAADPQWKTDSCQGDSGGPLVCSLQGRMTLTGIVSWGVGCALKDKPGVYTRVSHFLPWIRSHTKEENGLAL

SEQ ID NO: 968 - protein, 253 aa, Artificial Sequence
  UROKINASE-TYPE PLASMINOGEN ACTIVATOR (u-PA) protease domain V38E/T56I/H99Q/C122S/Y151L/S190G/R217V
IIGGEFTTIENQPWFAAIYRRHRGGSETYVCGGSLISPCWVISAIHCFIDYPKKEDYIVYLGRSRLNSNTQGEMKFEVENLILHKDYSADTLAQHNDIALLKIRSKEGRCAQPSRTIQTISLPSMYNDPQFGTSCEITGFGKENSTDYLLPEQLKMTVVKLISHRECQQPHYYGSEVTTKMLCAADPQWKTDGCQGDSGGPLVCSLQGRMTLTGIVSWGVGCALKDKPGVYTRVSHFLPWIRSHTKEENGLAL

SEQ ID NO: 969 - protein, 253 aa, Artificial Sequence
  UROKINASE-TYPE PLASMINOGEN ACTIVATOR (u-PA) protease domain F30Y/V38E/L97bR/C122S/Y151L/R217V
IIGGEFTTIENQPWYAAIYRRHRGGSETYVCGGSLISPCWVISATHCFIDYPKKEDYIVYLGRSRLNSNTQGEMKFEVENLILHKDYSADTRAHHNDIALLKIRSKEGRCAQPSRTIQTISLPSMYNDPQFGTSCEITGFGKENSTDYLLPEQLKMTVVKLISHRECQQPHYYGSEVTTKMLCAADPQWKTDSCQGDSGGPLVCSLQGRMTLTGIVSWGVGCALKDKPGVYTRVSHFLPWIRSHTKEENGLAL

SEQ ID NO: 970 - protein, 253 aa, Artificial Sequence
  UROKINASE-TYPE PLASMINOGEN ACTIVATOR (u-PA) protease domain V38E/T39S/V41L/Y60bP/L97bG/H99Q/C122S
IIGGEFTTIENQPWFAAIYRRHRGGSESYLCGGSLISPCWVISATHCFIDPPKKEDYIVYLGRSRLNSNTQGEMKFEVENLILHKDYSADTGAQHNDIALLKIRSKEGRCAQPSRTIQTISLPSMYNDPQFGTSCEITGFGKENSTDYLYPEQLKMTVVKLISHRECQQPHYYGSEVTTKMLCAADPQWKTDSCQGDSGGPLVCSLQGRMTLTGIVSWGRGCALKDKPGVYTRVSHFLPWIRSHTKEENGLAL

SEQ ID NO: 971 - protein, 253 aa, Artificial Sequence
  UROKINASE-TYPE PLASMINOGEN ACTIVATOR (u-PA) protease domain V38E/T39R/D60aP/Y60bD/L97bG/H99Q/C122S
IIGGEFTTIENQPWFAAIYRRHRGGSERYVCGGSLISPCWVISATHCFIPDPKKEDYIVYLGRSRLNSNTQGEMKFEVENLILHKDYSADTGAQHNDIALLKIRSKEGRCAQPSRTIQTISLPSMYNDPQFGTSCEITGFGKENSTDYLYPEQLKMTVVKLISHRECQQPHYYGSEVTTKMLCAADPQWKTDSCQGDSGGPLVCSLQGRMTLTGIVSWGRGCALKDKPGVYTRVSHFLPWIRSHTKEENGLAL

SEQ ID NO: 972 - protein, 253 aa, Artificial Sequence
  UROKINASE-TYPE PLASMINOGEN ACTIVATOR (u-PA) protease domain V38E/T39W/V41R/D60aP/Y60bD/L97bA/H99L/C122S
IIGGEFTTIENQPWFAAIYRRHRGGSEWYRCGGSLISPCWVISATHCFIPDPKKEDYIVYLGRSRLNSNTQGEMKFEVENLILHKDYSADTAALHNDIALLKIRSKEGRCAQPSRTIQTISLPSMYNDPQFGTSCEITGFGKENSTDYLYPEQLKMTVVKLISHRECQQPHYYGSEVTTKMLCAADPQWKTDSCQGDSGGPLVCSLQGRMTLTGIVSWGRGCALKDKPGVYTRVSHFLPWIRSHTKEENGLAL

SEQ ID NO: 973 - protein, 253 aa, Artificial Sequence
  UROKINASE-TYPE PLASMINOGEN ACTIVATOR (u-PA) protease domain V38E/T39Y/V41R/D60aW/Y60bP/L97bR/H99I/C122S
IIGGEFTTIENQPWFAAIYRRHRGGSEYYRCGGSLISPCWVISATHCFIWPPKKEDYIVYLGRSRLNSNTQGEMKFEVENLILHKDYSADTRAIHNDIALLKIRSKEGRCAQPSRTIQTISLPSMYNDPQFGTSCEITGFGKENSTDYLYPEQLKMTVVKLISHRECQQPHYYGSEVTTKMLCAADPQWKTDSCQGDSGGPLVCSLQGRMTLTGIVSWGRGCALKDKPGVYTRVSHFLPWIRSHTKEENGLAL

SEQ ID NO: 974 - protein, 253 aa, Artificial Sequence
  UROKINASE-TYPE PLASMINOGEN ACTIVATOR (u-PA) protease domain V38E/T39H/D60aP/Y60bK/L97bG/H99Q/C122S
IIGGEFTTIENQPWFAAIYRRHRGGSEHYVCGGSLISPCWVISATHCFIPKPKKEDYIVYLGRSRLNSNTQGEMKFEVENLILHKDYSADTGAQHNDIALLKIRSKEGRCAQPSRTIQTISLPSMYNDPQFGTSCEITGFGKENSTDYLYPEQLKMTVVKLISHRECQQPHYYGSEVTTKMLCAADPQWKTDSCQGDSGGPLVCSLQGRMTLTGIVSWGRGCALKDKPGVYTRVSHFLPWIRSHTKEENGLAL

SEQ ID NO: 975 - protein, 253 aa, Artificial Sequence
  UROKINASE-TYPE PLASMINOGEN ACTIVATOR (u-PA) protease domain V38E/T39L/V41R/D60aN/Y60bP/L97bG/H99Q/C122S
IIGGEFTTIENQPWFAAIYRRHRGGSELYRCGGSLISPCWVISATHCFINPPKKEDYIVYLGRSRLNSNTQGEMKFEVENLILHKDYSADTGAQHNDIALLKIRSKEGRCAQPSRTIQTISLPSMYNDPQFGTSCEITGFGKENSTDYLYPEQLKMTVVKLISHRECQQPHYYGSEVTTKMLCAADPQWKTDSCQGDSGGPLVCSLQGRMTLTGIVSWGRGCALKDKPGVYTRVSHFLPWIRSHTKEENGLAL

SEQ ID NO: 976 - protein, 253 aa, Artificial Sequence
  UROKINASE-TYPE PLASMINOGEN ACTIVATOR (u-PA) protease domain V38E/T39H/D60aP/Y60bW/L97bG/H99Q/C122S
IIGGEFTTIENQPWFAAIYRRHRGGSEHYVCGGSLISPCWVISATHCFIPWPKKEDYIVYLGRSRLNSNTQGEMKFEVENLILHKDYSADTGAQHNDIALLKIRSKEGRCAQPSRTIQTISLPSMYNDPQFGTSCEITGFGKENSTDYLYPEQLKMTVVKLISHRECQQPHYYGSEVTTKMLCAADPQWKTDSCQGDSGGPLVCSLQGRMTLTGIVSWGRGCALKDKPGVYTRVSHFLPWIRSHTKEENGLAL

SEQ ID NO: 977 - protein, 253 aa, Artificial Sequence
  UROKINASE-TYPE PLASMINOGEN ACTIVATOR (u-PA) protease domain V38E/T39W/V41R/D60aW/Y60bP/L97bG/H99L/C122S
IIGGEFTTIENQPWFAAIYRRHRGGSEWYRCGGSLISPCWVISATHCFIWPPKKEDYIVYLGRSRLNSNTQGEMKFEVENLILHKDYSADTGALHNDIALLKIRSKEGRCAQPSRTIQTISLPSMYNDPQFGTSCEITGFGKENSTDYLYPEQLKMTVVKLISHRECQQPHYYGSEVTTKMLCAADPQWKTDSCQGDSGGPLVCSLQGRMTLTGIVSWGRGCALKDKPGVYTRVSHFLPWIRSHTKEENGLAL

SEQ ID NO: 978 - protein, 253 aa, Artificial Sequence
  UROKINASE-TYPE PLASMINOGEN ACTIVATOR (u-PA) protease domain R35H/V38E/T39Y/V41R/D60aP/Y60bQ/L97bA/H99Q/C122S/I 138V/E167K
IIGGEFTTIENQPWFAAIYHRHRGGSEYYRCGGSLISPCWVISATHCFIPQPKKEDYIVYLGRSRLNSNTQGEMKFEVENLILHKDYSADTAAQHNDIALLKIRSKEGRCAQPSRTIQTISLPSMYNDPQFGTSCEVTGFGKENSTDYLYPEQLKMTVVKLISHRKCQQPHYYGSEVTTKMLCAADPQWKTDSCQGDSGGPLVCSLQGRMTLTGIVSWGRGCALKDKPGVYTRVSHFLPWIRSHTKEENGLAL

SEQ ID NO: 979 - protein, 253 aa, Artificial Sequence
  UROKINASE-TYPE PLASMINOGEN ACTIVATOR (u-PA) protease domain R35H/V38E/T39Y/V41R/D60aP/Y60bQ/L97bA/H99Q/C122S/T 158S/E167K
IIGGEFTTIENQPWFAAIYHRHRGGSEYYRCGGSLISPCWVISATHCFIPQPKKEDYIVYLGRSRLNSNTQGEMKFEVENLILHKDYSADTAAQHNDIALLKIRSKEGRCAQPSRTIQTISLPSMYNDPQFGTSCEITGFGKENSTDYLYPEQLKMSVVKLISHRKCQQPHYYGSEVTTKMLCAADPQWKTDSCQGDSGGPLVCSLQGRMTLTGIVSWGRGCALKDKPGVYTRVSHFLPWIRSHTKEENGLAL

SEQ ID NO: 980 - protein, 253 aa, Artificial Sequence
  UROKINASE-TYPE PLASMINOGEN ACTIVATOR (u-PA) protease domain R35H/G37bD/V38E/T39Y/V41R/D60aP/Y60bQ/L97bA/H99Q/C 122S/T158S
IIGGEFTTIENQPWFAAIYHRHRDGSEYYRCGGSLISPCWVISATHCFIPQPKKEDYIVYLGRSRLNSNTQGEMKFEVENLILHKDYSADTAAQHNDIALLKIRSKEGRCAQPSRTIQTISLPSMYNDPQFGTSCEITGFGKENSTDYLYPEQLKMSVVKLISHRECQQPHYYGSEVTTKMLCAADPQWKTDSCQGDSGGPLVCSLQGRMTLTGIVSWGRGCALKDKPGVYTRVSHFLPWIRSHTKEENGLAL

SEQ ID NO: 981 - protein, 253 aa, Artificial Sequence
  UROKINASE-TYPE PLASMINOGEN ACTIVATOR (u-PA) protease domain R35H/V38E/T39Y/V41R/D60aP/Y60bQ/L97bA/H99Q/C122S/T 158A
IIGGEFTTIENQPWFAAIYHRHRGGSEYYRCGGSLISPCWVISATHCFIPQPKKEDYIVYLGRSRLNSNTQGEMKFEVENLILHKDYSADTAAQHNDIALLKIRSKEGRCAQPSRTIQTISLPSMYNDPQFGTSCEITGFGKENSTDYLYPEQLKMAVVKLISHRECQQPHYYGSEVTTKMLCAADPQWKTDSCQGDSGGPLVCSLQGRMTLTGIVSWGRGCALKDKPGVYTRVSHFLPWIRSHTKEENGLAL

SEQ ID NO: 982 - protein, 253 aa, Artificial Sequence
  UROKINASE-TYPE PLASMINOGEN ACTIVATOR (u-PA) protease domain R35H/V38E/T39Y/V41R/T56A/D60aP/Y60bQ/L97bA/H99Q/C1 22S
IIGGEFTTIENQPWFAAIYHRHRGGSEYYRCGGSLISPCWVISAAHCFIPQPKKEDYIVYLGRSRLNSNTQGEMKFEVENLILHKDYSADTAAQHNDIALLKIRSKEGRCAQPSRTIQTISLPSMYNDPQFGTSCEITGFGKENSTDYLYPEQLKMTVVKLISHRECQQPHYYGSEVTTKMLCAADPQWKTDSCQGDSGGPLVCSLQGRMTLTGIVSWGRGCALKDKPGVYTRVSHFLPWIRSHTKEENGLAL

SEQ ID NO: 983 - protein, 253 aa, Artificial Sequence
  UROKINASE-TYPE PLASMINOGEN ACTIVATOR (u-PA) protease domain R35H/V38E/T39Y/V41R/T56S/D60aP/Y60bQ/L97bA/H99Q/C1 22S/T158S
IIGGEFTTIENQPWFAAIYHRHRGGSEYYRCGGSLISPCWVISASHCFIPQPKKEDYIVYLGRSRLNSNTQGEMKFEVENLILHKDYSADTAAQHNDIALLKIRSKEGRCAQPSRTIQTISLPSMYNDPQFGTSCEITGFGKENSTDYLYPEQLKMSVVKLISHRECQQPHYYGSEVTTKMLCAADPQWKTDSCQGDSGGPLVCSLQGRMTLTGIVSWGRGCALKDKPGVYTRVSHFLPWIRSHTKEENGLAL

SEQ ID NO: 984 - protein, 253 aa, Artificial Sequence
  UROKINASE-TYPE PLASMINOGEN ACTIVATOR (u-PA) protease domain R37aH/V38E/T39Y/V41R/T56A/D60aP/Y60bQ/L97bA/H99Q/C 122S/T158A
IIGGEFTTIENQPWFAAIYRRHHGGSEYYRCGGSLISPCWVISAAHCFIPQPKKEDYIVYLGRSRLNSNTQGEMKFEVENLILHKDYSADTAAQHNDIALLKIRSKEGRCAQPSRTIQTISLPSMYNDPQFGTSCEITGFGKENSTDYLYPEQLKMAVVKLISHRECQQPHYYGSEVTTKMLCAADPQWKTDSCQGDSGGPLVCSLQGRMTLTGIVSWGRGCALKDKPGVYTRVSHFLPWIRSHTKEENGLAL

SEQ ID NO: 985 - protein, 253 aa, Artificial Sequence
  UROKINASE-TYPE PLASMINOGEN ACTIVATOR (u-PA) protease domain R37aH/V38E/T39Y/V41R/D60aP/Y60bQ/L97bA/H99Q/C122S
IIGGEFTTIENQPWFAAIYRRHHGGSEYYRCGGSLISPCWVISATHCFIPQPKKEDYIVYLGRSRLNSNTQGEMKFEVENLILHKDYSADTAAQHNDIALLKIRSKEGRCAQPSRTIQTISLPSMYNDPQFGTSCEITGFGKENSTDYLYPEQLKMTVVKLISHRECQQPHYYGSEVTTKMLCAADPQWKTDSCQGDSGGPLVCSLQGRMTLTGIVSWGRGCALKDKPGVYTRVSHFLPWIRSHTKEENGLAL

SEQ ID NO: 986 - protein, 253 aa, Artificial Sequence
  UROKINASE-TYPE PLASMINOGEN ACTIVATOR (u-PA) protease domain R35H/V38E/T39Y/V41R/D60aP/Y60bQ/P60cS/L97bA/H99Q/C 122S/I138V/E167K
IIGGEFTTIENQPWFAAIYHRHRGGSEYYRCGGSLISPCWVISATHCFIPQSKKEDYIVYLGRSRLNSNTQGEMKFEVENLILHKDYSADTAAQHNDIALLKIRSKEGRCAQPSRTIQTISLPSMYNDPQFGTSCEVTGFGKENSTDYLYPEQLKMTVVKLISHRKCQQPHYYGSEVTTKMLCAADPQWKTDSCQGDSGGPLVCSLQGRMTLTGIVSWGRGCALKDKPGVYTRVSHFLPWIRSHTKEENGLAL

SEQ ID NO: 987 - protein, 253 aa, Artificial Sequence
  UROKINASE-TYPE PLASMINOGEN ACTIVATOR (u-PA) protease domain R35Q/H37Y/R37aE/V38E/T39Y/V41R/D60aP/Y60bQ/T97aI/L 97bA/C122C/H99Q/Y149R
IIGGEFTTIENQPWFAAIYQRYEGGSEYYRCGGSLISPCWVISATHCFIPQPKKEDYIVYLGRSRLNSNTQGEMKFEVENLILHKDYSADIAAQHNDIALLKIRSKEGRCAQPSRTIQTICLPSMYNDPQFGTSCEITGFGKENSTDRLYPEQLKMTVVKLISHRECQQPHYYGSEVTTKMLCAADPQWKTDSCQGDSGGPLVCSLQGRMTLTGIVSWGRGCALKDKPGVYTRVSHFLPWIRSHTKEENGLAL

SEQ ID NO: 988 - DNA, 6418 bp, Artificial Sequence
  pE5 plasmid
gatctcgatcccgcgaaattaatacgactcactataggggaattgtgagcggataacaattcccctctagtaataattttgtttaactttaagaaggaggtctagaatgggtcatcatcaccatcatcatggtagcctgcaggatagcgaagttaatcaagaagcaaaaccggaagttaagccggaagtgaaacctgaaacacatattaacctgaaagtgagtgatggcagcagcgaaatcttcttcaaaatcaaaaaaaccacaccgctgcgtcgtctgatggaagcatttgcaaaacgtcagggtaaagaaatggatagcctgcgttttctgtatgatggtattcgtattcaggcagatcaggcaccggaagatctggatatggaagataacgatattatcgaagcacatcgtgagcagattggtggtgttgttggtggcaccgatgcagatgaaggtgaatggccgtggcaggttagcctgcatgcattaggtcatggtcatagctgtggtgcaagcctgattagcccgaattggctggttagcgcagcacattgttatattgatacccgtggtagccgttggagcgatccgacacagtggaccgcatttctgggtctgcatgatcagagccagcgtagcgcaccgggtgttcaagaacgtcgcctgaaacgtattattagccatccgttttttaataaaggtgtgccgctggattatgatattgcactgctggaactggaaaaaccggcagaatatagcagcatggttcgtccgatttgtctgccggatgcaagccatgtttttccggcaggtaaagcaatttgggttaccggttggggtcatacccagtatggtggtacacatgcactgatcctgcagaaaggtgaaattcgtgttattaatcagaccacgtgtgaaaatctgctgccgcagctgattacaccgcgtatgatgtgtgttggttttctgagcggtggtgtggatagctgtgatggcgatagcggtggtccgctgagcagcgttgaagcagatggtcgtatttttcaggcaggcgttgttagctggggtgatggttgtgcacagcgtaataaaccgggtgtgtatacccgtctgccgctgtttcgtgattggattaaagaaaataccggtgtgtaataactcgagcaccaccaccaccaccactgagatccggctgctaacaaagcccgaaaggaagctgagttggctgctgccaccgctgagcaataactagcataaccccttggggcctctaaacgggtcttgaggggttttttgctgaaaggaggaactatatccggattggcgaatgggacgcgccctgtagcggcgcattaagcgcggcgggtgtggtggttacgcgcagcgtgaccgctacacttgccagcgccctagcgcccgctcctttcgctttcttcccttcctttctcgccacgttcgccggctttccccgtcaagctctaaatcgggggctccctttagggttccgatttagtgctttacggcacctcgaccccaaaaaacttgattagggtgatggttcacgtagtgggccatcgccctgatagacggtttttcgccctttgacgttggagtccacgttctttaatagtggactcttgttccaaactggaacaacactcaaccctatctcggtctattcttttgatttataagggattttgccgatttcggcctattggttaaaaaatgagctgatttaacaaaaatttaacgcgaattttaacaaaatattaacgcttacaatttaggtggcacttttcggggaaatgtgcgcggaacccctatttgtttatttttctaaatacattcaaatatgtatccgctcatgagacaataaccctgataaatgcttcaataatattgaaaaaggaagagtatgagtattcaacatttccgtgtcgcccttattcccttttttgcggcattttgccttcctgtttttgctcacccagaaacgctggtgaaagtaaaagatgctgaagatcagttgggtgcacgagtgggttacatcgaactggatctcaacagcggtaagatccttgagagttttcgccccgaagaacgttttccaatgatgagcacttttaaagttctgctatgtggcgcggtattatcccgtattgacgccgggcaagagcaactcggtcgccgcatacactattctcagaatgacttggttgagtactcaccagtcacagaaaagcatcttacggatggcatgacagtaagagaattatgcagtgctgccataaccatgagtgataacactgcggccaacttacttctgacaacgatcggaggaccgaaggagctaaccgcttttttgcacaacatgggggatcatgtaactcgccttgatcgttgggaaccggagctgaatgaagccataccaaacgacgagcgtgacaccacgatgcctgcagcaatggcaacaacgttgcgcaaactattaactggcgaactacttactctagcttcccggcaacaattaatagactggatggaggcggataaagttgcaggaccacttctgcgctcggcccttccggctggctggtttattgctgataaatctggagccggtgagcgtgggtctcgcggtatcattgcagcactggggccagatggtaagccctcccgtatcgtagttatctacacgacggggagtcaggcaactatggatgaacgaaatagacagatcgctgagataggtgcctcactgattaagcattggtaactgtcagaccaagtttactcatatatactttagattgatttaaaacttcatttttaatttaaaaggatctaggtgaagatcctttttgataatctcatgaccaaaatcccttaacgtgagttttcgttccactgagcgtcagaccccgtagaaaagatcaaaggatcttcttgagatcctttttttctgcgcgtaatctgctgcttgcaaacaaaaaaaccaccgctaccagcggtggtttgtttgccggatcaagagctaccaactctttttccgaaggtaactggcttcagcagagcgcagataccaaatactgtccttctagtgtagccgtagttaggccaccacttcaagaactctgtagcaccgcctacatacctcgctctgctaatcctgttaccagtggctgctgccagtggcgataagtcgtgtcttaccgggttggactcaagacgatagttaccggataaggcgcagcggtcgggctgaacggggggttcgtgcacacagcccagcttggagcgaacgacctacaccgaactgagatacctacagcgtgagctatgagaaagcgccacgcttcccgaagggagaaaggcggacaggtatccggtaagcggcagggtcggaacaggagagcgcacgagggagcttccagggggaaacgcctggtatctttatagtcctgtcgggtttcgccacctctgacttgagcgtcgatttttgtgatgctcgtcaggggggcggagcctatggaaaaacgccagcaacgcggcctttttacggttcctggccttttgctggccttttgctcacatgttctttcctgcgttatcccctgattctgtggataaccgtattaccgcctttgagtgagctgataccgctcgccgcagccgaacgaccgagcgcagcgagtcagtgagcgaggaagcggaagagcgcctgatgcggtattttctccttacgcatctgtgcggtatttcacaccgcaatggtgcactctcagtacaatctgctctgatgccgcatagttaagccagtatacactccgctatcgctacgtgactgggtcatggctgcgccccgacacccgccaacacccgctgacgcgccctgacgggcttgtctgctcccggcatccgcttacagacaagctgtgaccgtctccgggagctgcatgtgtcagaggttttcaccgtcatcaccgaaacgcgcgaggcagctgcggtaaagctcatcagcgtggtcgtgaagcgattcacagatgtctgcctgttcatccgcgtccagctcgttgagtttctccagaagcgttaatgtctggcttctgataaagcgggccatgttaagggcggttttttcctgtttggtcactgatgcctccgtgtaagggggatttctgttcatgggggtaatgataccgatgaaacgagagaggatgctcacgatacgggttactgatgatgaacatgcccggttactggaacgttgtgagggtaaacaactggcggtatggatgcggcgggaccagagaaaaatcactcagggtcaatgccagcgcttcgttaatacagatgtaggtgttccacagggtagccagcagcatcctgcgatgcagatccggaacataatggtgcagggcgctgacttccgcgtttccagactttacgaaacacggaaaccgaagaccattcatgttgttgctcaggtcgcagacgttttgcagcagcagtcgcttcacgttcgctcgcgtatcggtgattcattctgctaaccagtaaggcaaccccgccagcctagccgggtcctcaacgacaggagcacgatcatgcgcacccgtggggccgccatgccggcgataatggcctgcttctcgccgaaacgtttggtggcgggaccagtgacgaaggcttgagcgagggcgtgcaagattccgaataccgcaagcgacaggccgatcatcgtcgcgctccagcgaaagcggtcctcgccgaaaatgacccagagcgctgccggcacctgtcctacgagttgcatgataaagaagacagtcataagtgcggcgacgatagtcatgccccgcgcccaccggaaggagctgactgggttgaaggctctcaagggcatcggtcgagatcccggtgcctaatgagtgagctaacttacattaattgcgttgcgctcactgcccgctttccagtcgggaaacctgtcgtgccagctgcattaatgaatcggccaacgcgcggggagaggcggtttgcgtattgggcgccagggtggtttttcttttcaccagtgagacgggcaacagctgattgcccttcaccgcctggccctgagagagttgcagcaagcggtccacgctggtttgccccagcaggcgaaaatcctgtttgatggtggttaacggcgggatataacatgagctgtcttcggtatcgtcgtatcccactaccgagatatccgcaccaacgcgcagcccggactcggtaatggcgcgcattgcgcccagcgccatctgatcgttggcaaccagcatcgcagtgggaacgatgccctcattcagcatttgcatggtttgttgaaaaccggacatggcactccagtcgccttcccgttccgctatcggctgaatttgattgcgagtgagatatttatgccagccagccagacgcagacgcgccgagacagaacttaatgggcccgctaacagcgcgatttgctggtgacccaatgcgaccagatgctccacgcccagtcgcgtaccgtcttcatgggagaaaataatactgttgatgggtgtctggtcagagacatcaagaaataacgccggaacattagtgcaggcagcttccacagcaatggcatcctggtcatccagcggatagttaatgatcagcccactgacgcgttgcgcgagaagattgtgcaccgccgctttacaggcttcgacgccgcttcgttctaccatcgacaccaccacgctggcacccagttgatcggcgcgagatttaatcgccgcgacaatttgcgacggcgcgtgcagggccagactggaggtggcaacgccaatcagcaacgactgtttgcccgccagttgttgtgccacgcggttgggaatgtaattcagctccgccatcgccgcttccactttttcccgcgttttcgcagaaacgtggctggcctggttcaccacgcgggaaacggtctgataagagacaccggcatactctgcgacatcgtataacgttactggtttcacattcaccaccctgaattgactctcttccgggcgctatcatgccataccgcgaaaggttttgcgccattcgatggtgtccgggatctcgacgctctcccttatgcgactcctgcattaggaagcagcccagtagtaggttgaggccgttgagcaccgccgccgcaaggaatggtgcatgcaaggagatggcgcccaacagtcccccggccacggggcctgccaccatacccacgccgaaacaagcgctcatgagcccgaagtggcgagcccgatcttccccatcggtgatgtcggcgatataggcgccagcaaccgcacctgtggcgccggtgatgccggccacgatgcgtccggcgtagaggatcga

SEQ ID NO: 989 - protein, 6 aa, Artificial Sequence
  HIS tag
HHHHHH

SEQ ID NO: 990 - protein, 108 aa, Artificial Sequence
  HIS tag-SUMO
MGHHHHHHGSLQDSEVNQEAKPEVKPEVKPETHINLKVSDGSSEIFFKIKKTTPLRRLMEAFAKRQGKEMDSLRFLYDGIRIQADQAPEDLDMEDNDIIEAHREQIGG

SEQ ID NO: 991 - protein, 585 aa, Homo sapiens [sequence omitted]

SEQ ID NO: 992 - protein, 226 aa, Homo sapiens
  Immunoglobulin Gamma-1 heavy chain (FC)
DKTHTCPPCPAPELLGGPSVFLFPPKPKDTLMISRTPEVTCVVVDVSHEDPEVKFNWYVDGVEVHNAKTKPREEQYNSTYRVVSVLTVLHQDWLNGKEYKCKVSNKALPAPIEKTISKAKGQPREPQVYTLPPSRDELTKNQVSLTCLVKGFYPSDIAVEWESNGQPENNYKTTPPVLDSDGSFFLYSKLTVDKSRWQQGNVFSCSVMHEALHNHYTQKSLSLSPG

SEQ ID NO: 993 - protein, 248 aa, Artificial Sequence
  Anti-Type-II collagen Antibody scFv Fragment
QVQLQQPGADLVRPGVSVKLSCKASGYTFTSYWMNWVKQRPGQGLEWIGMIHPSDSETRLSQKFKDKATLTVDKSSSTAYMQLSSPTSEDSAVYYCARLKPGGTWFAYWGQGTLVTVSAGGGGSGGGGSGGGGSGGSDIVLTQSPASLTVSLGQRATISCRASKSVDSYGNSFMEWYQQKPGQPPKLLIYRASNLESGIPARFSGSGSRTDFTLTINPVEADDVATYYCQQSNEDPYTFGGGTKLEIK

SEQ ID NO: 994 - protein, 103 aa, Artificial Sequence
  human Tumor necrosis factor-stimulated gene-6 (TSG-6) aa residues 32-134 (HABP)
ERAAGVYHREARSGKYKLTYAEAKAVCEFEGGHLATYKQLEAARKIGFHVCAAGWMAKGRVGYPIVKPGPNCGFGKTGIIDYGIRLNRSERWDAYCYNPHAKE

SEQ ID NO: 995 - protein, 12 aa, Artificial Sequence
  Furin activation sequence
QCGQKTLRRRKR

SEQ ID NO: 996 - protein, 12 aa, Artificial Sequence
  Furin activation sequence
QSGQKTLRRRKR

SEQ ID NO: 997 - protein, 12 aa, Artificial Sequence
  UROKINASE-TYPE PLASMINOGEN ACTIVATOR (u-PA) activation sequence
QCGQKTLRPRFK

SEQ ID NO: 998 - protein, 12 aa, Artificial Sequence
  UROKINASE-TYPE PLASMINOGEN ACTIVATOR (u-PA) activation sequence
QSGQKTLRPRFK

SEQ ID NO: 999 - protein, 20 aa, Mus musculus
  Ig kappa chain V-III region signal peptide (IgGkSP)
METDTLLLWVLLLWVPGSTG

SEQ ID NO: 1000 - protein, 20 aa, Homo sapiens
  human IL2 Signal Peptide (hIL2SP)
MYRMQLLSCIALSLALVTNS

SEQ ID NO: 1001 - protein, 5 aa, Artificial Sequence
  GGGGS linker
GGGGS

SEQ ID NO: 1002 - protein, 6 aa, Artificial Sequence
  GGSSGG linker
GGSSGG

SEQ ID NO: 1003 - protein, 3 aa, Artificial Sequence
  AGS linker
AGS

SEQ ID NO: 1004 - protein, 514 aa, Artificial Sequence
  IgGkSP-FC-AGS-uPA R35Q/H37Y/R37aE/V38E/T39Y/V41R/D60aP/Y60bQ/T97aI/L 97bA/H99Q/Y149R fusion
METDTLLLWVLLLWVPGSTGDKTHTCPPCPAPELLGGPSVFLFPPKPKDTLMISRTPEVTCVVVDVSHEDPEVKFNWYVDGVEVHNAKTKPREEQYNSTYRVVSVLTVLHQDWLNGKEYKCKVSNKALPAPIEKTISKAKGQPREPQVYTLPPSRDELTKNQVSLTCLVKGFYPSDIAVEWESNGQPENNYKTTPPVLDSDGSFFLYSKLTVDKSRWQQGNVFSCSVMHEALHNHYTQKSLSLSPGAGSQCGQKTLRPRFKIIGGEFTTIENQPWFAAIYQRYEGGSEYYRCGGSLISPCWVISATHCFIPQPKKEDYIVYLGRSRLNSNTQGEMKFEVENLILHKDYSADIAAQHNDIALLKIRSKEGRCAQPSRTIQTICLPSMYNDPQFGTSCEITGFGKENSTDRLYPEQLKMTVVKLISHRECQQPHYYGSEVTTKMLCAADPQWKTDSCQGDSGGPLVCSLQGRMTLTGIVSWGRGCALKDKPGVYTRVSHFLPWIRSHTKEENGLAL

SEQ ID NO: 1005 - protein, 431 aa, Artificial Sequence
  IgGkSP-uPA R35Q/H37Y/R37aE/V38E/T39Y/V41R/D60aP/Y60bQ/T97aI/L 97bA/H99Q/Y149R
METDTLLLWVLLLWVPGSTGSNELHQVPSNCDCLNGGTCVSNKYFSNIHWCNCPKKFGGQHCEIDKSKTCYEGNGHFYRGKASTDTMGRPCLPWNSATVLQQTYHAHRSDALQLGLGKHNYCRNPDNRRRPWCYVQVGLKPLVQECMVHDCADGKKPSSPPEELKFQCGQKTLRPRFKIIGGEFTTIENQPWFAAIYQRYEGGSEYYRCGGSLISPCWVISATHCFIPQPKKEDYIVYLGRSRLNSNTQGEMKFEVENLILHKDYSADIAAQHNDIALLKIRSKEGRCAQPSRTIQTICLPSMYNDPQFGTSCEITGFGKENSTDRLYPEQLKMTVVKLISHRECQQPHYYGSEVTTKMLCAADPQWKTDSCQGDSGGPLVCSLQGRMTLTGIVSWGRGCALKDKPGVYTRVSHFLPWIRSHTKEENGLAL

SEQ ID NO: 1006 - protein, 505 aa, Artificial Sequence
  hIL2ss-uPA R35Q/H37Y/R37aE/V38E/T39Y/V41R/D60aP/Y60bQ/T97aI/L 97bA/H99Q/C122S/Y149R-IgG1Fc
MYRMQLLSCIALSLALVTNSIIGGEFTTIENQPWFAAIYQRYEGGSEYYRCGGSLISPCWVISATHCFIPQPKKEDYIVYLGRSRLNSNTQGEMKFEVENLILHKDYSADIAAQHNDIALLKIRSKEGRCAQPSRTIQTISLPSMYNDPQFGTSCEITGFGKENSTDRLYPEQLKMTVVKLISHRECQQPHYYGSEVTTKMLCAADPQWKTDSCQGDSGGPLVCSLQGRMTLTGIVSWGRGCALKDKPGVYTRVSHFLPWIRSHTKEENGLALGGSSGGDKTHTCPPCPAPELLGGPSVFLFPPKPKDTLMISRTPEVTCVVVDVSHEDPEVKFNWYVDGVEVHNAKTKPREEQYNSTYRVVSVLTVLHQDWLNGKEYKCKVSNKALPAPIEKTISKAKGQPREPQVYTLPPSRDELTKNQVSLTCLVKGFYPSDIAVEWESNGQPENNYKTTPPVLDSDGSFFLYSKLTVDKSRWQQGNVFSCSVMHEALHNHYTQKSLSLSPG

SEQ ID NO: 1007 - protein, 864 aa, Artificial Sequence
  hIL2ss-uPA R35Q/H37Y/R37aE/V38E/T39Y/V41R/D60aP/Y60bQ/T97aI/L 97bA/H99Q/C122S/Y149R-HSA
MYRMQLLSCIALSLALVTNSIIGGEFTTIENQPWFAAIYQRYEGGSEYYRCGGSLISPCWVISATHCFIPQPKKEDYIVYLGRSRLNSNTQGEMKFEVENLILHKDYSADIAAQHNDIALLKIRSKEGRCAQPSRTIQTISLPSMYNDPQFGTSCEITGFGKENSTDRLYPEQLKMTVVKLISHRECQQPHYYGSEVTTKMLCAADPQWKTDSCQGDSGGPLVCSLQGRMTLTGIVSWGRGCALKDKPGVYTRVSHFLPWIRSHTKEENGLALGGSSGGDAHKSEVAHRFKDLGEENFKALVLIAFAQYLQQCPFEDHVKLVNEVTEFAKTCVADESAENCDKSLHTLFGDKLCTVATLRETYGEMADCCAKQEPERNECFLQHKDDNPNLPRLVRPEVDVMCTAFHDNEETFLKKYLYEIARRHPYFYAPELLFFAKRYKAAFTECCQAADKAACLLPKLDELRDEGKASSAKQRLKCASLQKFGERAFKAWAVARLSQRFPKAEFAEVSKLVTDLTKVHTECCHGDLLECADDRADLAKYICENQDSISSKLKECCEKPLLEKSHCIAEVENDEMPADLPSLAADFVESKDVCKNYAEAKDVFLGMFLYEYARRHPDYSVVLLLRLAKTYETTLEKCCAAADPHECYAKVFDEFKPLVEEPQNLIKQNCELFEQLGEYKFQNALLVRYTKKVPQVSTPTLVEVSRNLGKVGSKCCKHPEAKRMPCAEDYLSVVLNQLCVLHEKTPVSDRVTKCCTESLVNRRPCFSALEVDETYVPKEFNAETFTFHADICTLSEKERQIKKQTALVELVKHKPKATKEQLKAVMDDFAAFVEKCCKADDKETCFAEEGKKLVAASQAALGL

SEQ ID NO: 1008 - protein, 864 aa, Artificial Sequence; identical to SEQ ID NO: 1007
  hIL2ss-uPA R35Q/H37Y/R37aE/V38E/T39Y/V41R/D60aP/Y60bQ/T97aI/L 97bA/H99Q/C122S/Y149R-C2scFv

SEQ ID NO: 1009 - protein, 382 aa, Artificial Sequence
  hIL2ss-uPA R35Q/H37Y/R37aE/V38E/T39Y/V41R/D60aP/Y60bQ/T97aI/L 97bA/H99Q/C122S/Y149R-HABD
MYRMQLLSCIALSLALVTNSIIGGEFTTIENQPWFAAIYQRYEGGSEYYRCGGSLISPCWVISATHCFIPQPKKEDYIVYLGRSRLNSNTQGEMKFEVENLILHKDYSADIAAQHNDIALLKIRSKEGRCAQPSRTIQTISLPSMYNDPQFGTSCEITGFGKENSTDRLYPEQLKMTVVKLISHRECQQPHYYGSEVTTKMLCAADPQWKTDSCQGDSGGPLVCSLQGRMTLTGIVSWGRGCALKDKPGVYTRVSHFLPWIRSHTKEENGLALGGSSGGERAAGVYHREARSGKYKLTYAEAKAVCEFEGGHLATYKQLEAARKIGFHVCAAGWMAKGRVGYPIVKPGPNCGFGKTGIIDYGIRLNRSERWDAYCYNPHAKE

SEQ ID NO: 1010 - protein, 516 aa, Artificial Sequence
  IgGkSP-Furin-uPA R35Q/H37Y/R37aE/V38E/T39Y/V41R/D60aP/Y60bQ/T97aI/L 97bA/H99Q/C122S/Y149R-FC
METDTLLLWVLLLWVPGSTGQSGQKTLRRKRIIGGEFTTIENQPWFAAIYQRYEGGSEYYRCGGSLISPCWVISATHCFIPQPKKEDYIVYLGRSRLNSNTQGEMKFEVENLILHKDYSADIAAQHNDIALLKIRSKEGRCAQPSRTIQTISLPSMYNDPQFGTSCEITGFGKENSTDRLYPEQLKMTVVKLISHRECQQPHYYGSEVTTKMLCAADPQWKTDSCQGDSGGPLVCSLQGRMTLTGIVSWGRGCALKDKPGVYTRVSHFLPWIRSHTKEENGLALGGSSGGDKTHTCPPCPAPELLGGPSVFLFPPKPKDTLMISRTPEVTCVVVDVSHEDPEVKFNWYVDGVEVHNAKTKPREEQYNSTYRVVSVLTVLHQDWLNGKEYKCKVSNKALPAPIEKTISKAKGQPREPQVYTLPPSRDELTKNQVSLTCLVKGFYPSDIAVEWESNGQPENNYKTTPPVLDSDGSFFLYSKLTVDKSRWQQGNVFSCSVMHEALHNHYTQKSLSLSPG

SEQ ID NO: 1011 - protein, 663 aa, Artificial Sequence
  IgGkSP-uPA R35Q/H37Y/R37aE/V38E/T39Y/V41R/D60aP/Y60bQ/T97aI/L 97bA/H99Q/Y149R-FC
METDTLLLWVLLLWVPGSTGSNELHQVPSNCDCLNGGTCVSNKYFSNIHWCNCPKKFGGQHCEIDKSKTCYEGNGHFYRGKASTDTMGRPCLPWNSATVLQQTYHAHRSDALQLGLGKHNYCRNPDNRRRPWCYVQVGLKPLVQECMVHDCADGKKPSSPPEELKFQCGQKTLRPRFKIIGGEFTTIENQPWFAAIYQRYEGGSEYYRCGGSLISPCWVISATHCFIPQPKKEDYIVYLGRSRLNSNTQGEMKFEVENLILHKDYSADIAAQHNDIALLKIRSKEGRCAQPSRTIQTICLPSMYNDPQFGTSCEITGFGKENSTDRLYPEQLKMTVVKLISHRECQQPHYYGSEVTTKMLCAADPQWKTDSCQGDSGGPLVCSLQGRMTLTGIVSWGRGCALKDKPGVYTRVSHFLPWIRSHTKEENGLALGGSSGGDKTHTCPPCPAPELLGGPSVFLFPPKPKDTLMISRTPEVTCVVVDVSHEDPEVKFNWYVDGVEVHNAKTKPREEQYNSTYRVVSVLTVLHQDWLNGKEYKCKVSNKALPAPIEKTISKAKGQPREPQVYTLPPSRDELTKNQVSLTCLVKGFYPSDIAVEWESNGQPENNYKTTPPVLDSDGSFFLYSKLTVDKSRWQQGNVFSCSVMHEALHNHYTQKSLSLSPG

SEQ ID NO: 1012 - protein, 505 aa, Artificial Sequence
  hIL2ss-uPA -FC
MYRMQLLSCIALSLALVTNSIIGGEFTTIENQPWFAAIYRRHRGGSVTYVCGGSLMSPCWVISATHCFIDYPKKEDYIVYLGRSRLNSNTQGEMKFEVENLILHKDYSADTLAHHNDIALLKIRSKEGRCAQPSRTIQTISLPSMYNDPQFGTSCEITGFGKENSTDYLYPEQLKMTVVKLISHRECQQPHYYGSEVTTKMLCAADPQWKTDSCQGDSGGPLVCSLQGRMTLTGIVSWGRGCALKDKPGVYTRVSHFLPWIRSHTKEENGLALGGSSGGDKTHTCPPCPAPELLGGPSVFLFPPKPKDTLMISRTPEVTCVVVDVSHEDPEVKFNWYVDGVEVHNAKTKPREEQYNSTYRVVSVLTVLHQDWLNGKEYKCKVSNKALPAPIEKTISKAKGQPREPQVYTLPPSRDELTKNQVSLTCLVKGFYPSDIAVEWESNGQPENNYKTTPPVLDSDGSFFLYSKLTVDKSRWQQGNVFSCSVMHEALHNHYTQKSLSLSPG

SEQ ID NO: 1013 - protein, 864 aa, Artificial Sequence
  hIL2ss-uPA -HSA
MYRMQLLSCIALSLALVTNSIIGGEFTTIENQPWFAAIYRRHRGGSVTYVCGGSLMSPCWVISATHCFIDYPKKEDYIVYLGRSRLNSNTQGEMKFEVENLILHKDYSADTLAHHNDIALLKIRSKEGRCAQPSRTIQTISLPSMYNDPQFGTSCEITGFGKENSTDYLYPEQLKMTVVKLISHRECQQPHYYGSEVTTKMLCAADPQWKTDSCQGDSGGPLVCSLQGRMTLTGIVSWGRGCALKDKPGVYTRVSHFLPWIRSHTKEENGLALGGSSGGDAHKSEVAHRFKDLGEENFKALVLIAFAQYLQQCPFEDHVKLVNEVTEFAKTCVADESAENCDKSLHTLFGDKLCTVATLRETYGEMADCCAKQEPERNECFLQHKDDNPNLPRLVRPEVDVMCTAFHDNEETFLKKYLYEIARRHPYFYAPELLFFAKRYKAAFTECCQAADKAACLLPKLDELRDEGKASSAKQRLKCASLQKFGERAFKAWAVARLSQRFPKAEFAEVSKLVTDLTKVHTECCHGDLLECADDRADLAKYICENQDSISSKLKECCEKPLLEKSHCIAEVENDEMPADLPSLAADFVESKDVCKNYAEAKDVFLGMFLYEYARRHPDYSVVLLLRLAKTYETTLEKCCAAADPHECYAKVFDEFKPLVEEPQNLIKQNCELFEQLGEYKFQNALLVRYTKKVPQVSTPTLVEVSRNLGKVGSKCCKHPEAKRMPCAEDYLSVVLNQLCVLHEKTPVSDRVTKCCTESLVNRRPCFSALEVDETYVPKEFNAETFTFHADICTLSEKERQIKKQTALVELVKHKPKATKEQLKAVMDDFAAFVEKCCKADDKETCFAEEGKKLVAASQAALGL

SEQ ID NO: 1014 - protein, 1022 aa, Artificial Sequence
  IgGkSP-Furin-u-PA R35Q/H37Y/R37aE/V38E/T39Y/V41R/D60aP/Y60bQ/T97aI/L 97bA/H99Q/Y149R-HSA
METDTLLLWVLLLWVPGSTGSNELHQVPSNCDCLNGGTCVSNKYFSNIHWCNCPKKFGGQHCEIDKSKTCYEGNGHFYRGKASTDTMGRPCLPWNSATVLQQTYHAHRSDALQLGLGKHNYCRNPDNRRRPWCYVQVGLKPLVQECMVHDCADGKKPSSPPEELKFQCGQKTLRRRKRIIGGEFTTIENQPWFAAIYQRYEGGSEYYRCGGSLISPCWVISATHCFIPQPKKEDYIVYLGRSRLNSNTQGEMKFEVENLILHKDYSADIAAQHNDIALLKIRSKEGRCAQPSRTIQTICLPSMYNDPQFGTSCEITGFGKENSTDRLYPEQLKMTVVKLISHRECQQPHYYGSEVTTKMLCAADPQWKTDSCQGDSGGPLVCSLQGRMTLTGIVSWGRGCALKDKPGVYTRVSHFLPWIRSHTKEENGLALGGSSGGDAHKSEVAHRFKDLGEENFKALVLIAFAQYLQQCPFEDHVKLVNEVTEFAKTCVADESAENCDKSLHTLFGDKLCTVATLRETYGEMADCCAKQEPERNECFLQHKDDNPNLPRLVRPEVDVMCTAFHDNEETFLKKYLYEIARRHPYFYAPELLFFAKRYKAAFTECCQAADKAACLLPKLDELRDEGKASSAKQRLKCASLQKFGERAFKAWAVARLSQRFPKAEFAEVSKLVTDLTKVHTECCHGDLLECADDRADLAKYICENQDSISSKLKECCEKPLLEKSHCIAEVENDEMPADLPSLAADFVESKDVCKNYAEAKDVFLGMFLYEYARRHPDYSVVLLLRLAKTYETTLEKCCAAADPHECYAKVFDEFKPLVEEPQNLIKQNCELFEQLGEYKFQNALLVRYTKKVPQVSTPTLVEVSRNLGKVGSKCCKHPEAKRMPCAEDYLSVVLNQLCVLHEKTPVSDRVTKCCTESLVNRRPCFSALEVDETYVPKEFNAETFTFHADICTLSEKERQIKKQTALVELVKHKPKATKEQLKAVMDDFAAFVEKCCKADDKETCFAEEGKKLVAASQAALGL

SEQ ID NO: 1015 - protein, 1022 aa, Artificial Sequence
  IgGkSP-u-PA activation-u-PA R35Q/H37Y/R37aE/V38E/T39Y/V41R/D60aP/Y60bQ/T97aI/L 97bA/H99Q/Y149R-HSA
METDTLLLWVLLLWVPGSTGSNELHQVPSNCDCLNGGTCVSNKYFSNIHWCNCPKKFGGQHCEIDKSKTCYEGNGHFYRGKASTDTMGRPCLPWNSATVLQQTYHAHRSDALQLGLGKHNYCRNPDNRRRPWCYVQVGLKPLVQECMVHDCADGKKPSSPPEELKFQCGQKTLRPRFKIIGGEFTTIENQPWFAAIYQRYEGGSEYYRCGGSLISPCWVISATHCFIPQPKKEDYIVYLGRSRLNSNTQGEMKFEVENLILHKDYSADIAAQHNDIALLKIRSKEGRCAQPSRTIQTICLPSMYNDPQFGTSCEITGFGKENSTDRLYPEQLKMTVVKLISHRECQQPHYYGSEVTTKMLCAADPQWKTDSCQGDSGGPLVCSLQGRMTLTGIVSWGRGCALKDKPGVYTRVSHFLPWIRSHTKEENGLALGGSSGGDAHKSEVAHRFKDLGEENFKALVLIAFAQYLQQCPFEDHVKLVNEVTEFAKTCVADESAENCDKSLHTLFGDKLCTVATLRETYGEMADCCAKQEPERNECFLQHKDDNPNLPRLVRPEVDVMCTAFHDNEETFLKKYLYEIARRHPYFYAPELLFFAKRYKAAFTECCQAADKAACLLPKLDELRDEGKASSAKQRLKCASLQKFGERAFKAWAVARLSQRFPKAEFAEVSKLVTDLTKVHTECCHGDLLECADDRADLAKYICENQDSISSKLKECCEKPLLEKSHCIAEVENDEMPADLPSLAADFVESKDVCKNYAEAKDVFLGMFLYEYARRHPDYSVVLLLRLAKTYETTLEKCCAAADPHECYAKVFDEFKPLVEEPQNLIKQNCELFEQLGEYKFQNALLVRYTKKVPQVSTPTLVEVSRNLGKVGSKCCKHPEAKRMPCAEDYLSVVLNQLCVLHEKTPVSDRVTKCCTESLVNRRPCFSALEVDETYVPKEFNAETFTFHADICTLSEKERQIKKQTALVELVKHKPKATKEQLKAVMDDFAAFVEKCCKADDKETCFAEEGKKLVAASQAALGL

SEQ ID NO: 1016 - protein, 876 aa, Artificial Sequence
  IgGkSP-furin activation-uPA R35Q/H37Y/R37aE/V38E/T39Y/V41R/D60aP/Y60bQ/T97aI/L 97bA/H99Q/C122S/Y149R-linker-HSA
METDTLLLWVLLLWVPGSTGQSGQKTLRRRKRIIGGEFTTIENQPWFAAIYQRYEGGSEYYRCGGSLISPCWVISATHCFIPQPKKEDYIVYLGRSRLNSNTQGEMKFEVENLILHKDYSADIAAQHNDIALLKIRSKEGRCAQPSRTIQTISLPSMYNDPQFGTSCEITGFGKENSTDRLYPEQLKMTVVKLISHRECQQPHYYGSEVTTKMLCAADPQWKTDSCQGDSGGPLVCSLQGRMTLTGIVSWGRGCALKDKPGVYTRVSHFLPWIRSHTKEENGLALGGSSGGDAHKSEVAHRFKDLGEENFKALVLIAFAQYLQQCPFEDHVKLVNEVTEFAKTCVADESAENCDKSLHTLFGDKLCTVATLRETYGEMADCCAKQEPERNECFLQHKDDNPNLPRLVRPEVDVMCTAFHDNEETFLKKYLYEIARRHPYFYAPELLFFAKRYKAAFTECCQAADKAACLLPKLDELRDEGKASSAKQRLKCASLQKFGERAFKAWAVARLSQRFPKAEFAEVSKLVTDLTKVHTECCHGDLLECADDRADLAKYICENQDSISSKLKECCEKPLLEKSHCIAEVENDEMPADLPSLAADFVESKDVCKNYAEAKDVFLGMFLYEYARRHPDYSVVLLLRLAKTYETTLEKCCAAADPHECYAKVFDEFKPLVEEPQNLIKQNCELFEQLGEYKFQNALLVRYTKKVPQVSTPTLVEVSRNLGKVGSKCCKHPEAKRMPCAEDYLSVVLNQLCVLHEKTPVSDRVTKCCTESLVNRRPCFSALEVDETYVPKEFNAETFTFHADICTLSEKERQIKKQTALVELVKHKPKATKEQLKAVMDDFAAFVEKCCKADDKETCFAEEGKKLVAASQAALGL

SEQ ID NO: 1017 - protein, 972 aa, Artificial Sequence
  IgGkSS-HIS-SUMO-uPA R35Q/H37Y/R37aE/V38E/T39Y/V41R/D60aP/Y60bQ/T97aI/L 97bA/H99Q/C122S/Y149R-linker-HSA
METDTLLLWVLLLWVPGSTGDGHHHHHHGSLQDSEVNQEAKPEVKPEVKPETHINLKVSDGSSEIFFKIKKTTPLRRLMEAFAKRQGKEMDSLTFLYDGIEIQADQTPEDLDMEDNDIIEAHREQIGGIIGGEFTTIENQPWFAAIYQRYEGGSEYYRCGGSLISPCWVISATHCFIPQPKKEDYIVYLGRSRLNSNTQGEMKFEVENLILHKDYSADIAAQHNDIALLKIRSKEGRCAQPSRTIQTISLPSMYNDPQFGTSCEITGFGKENSTDRLYPEQLKMTVVKLISHRECQQPHYYGSEVTTKMLCAADPQWKTDSCQGDSGGPLVCSLQGRMTLTGIVSWGRGCALKDKPGVYTRVSHFLPWIRSHTKEENGLALGGSSGGDAHKSEVAHRFKDLGEENFKALVLIAFAQYLQQCPFEDHVKLVNEVTEFAKTCVADESAENCDKSLHTLFGDKLCTVATLRETYGEMADCCAKQEPERNECFLQHKDDNPNLPRLVRPEVDVMCTAFHDNEETFLKKYLYEIARRHPYFYAPELLFFAKRYKAAFTECCQAADKAACLLPKLDELRDEGKASSAKQRLKCASLQKFGERAFKAWAVARLSQRFPKAEFAEVSKLVTDLTKVHTECCHGDLLECADDRADLAKYICENQDSISSKLKECCEKPLLEKSHCIAEVENDEMPADLPSLAADFVESKDVCKNYAEAKDVFLGMFLYEYARRHPDYSVVLLLRLAKTYETTLEKCCAAADPHECYAKVFDEFKPLVEEPQNLIKQNCELFEQLGEYKFQNALLVRYTKKVPQVSTPTLVEVSRNLGKVGSKCCKHPEAKRMPCAEDYLSVVLNQLCVLHEKTPVSDRVTKCCTESLVNRRPCFSALEVDETYVPKEFNAETFTFHADICTLSEKERQIKKQTALVELVKHKPKATKEQLKAVMDDFAAFVEKCCKADDKETCFAEEGKKLVAASQAALGL

SEQ ID NO: 1018 - protein, 613 aa, Artificial Sequence
  IgGkSS-HIS-SUMO-uPA R35Q/H37Y/R37aE/V38E/T39Y/V41R/D60aP/Y60bQ/T97aI/L 97bA/H99Q/C122S/Y149R-linker-FC
METDTLLLWVLLLWVPGSTGDGHHHHHHGSLQDSEVNQEAKPEVKPEVKPETHINLKVSDGSSEIFFKIKKTTPLRRLMEAFAKRQGKEMDSLTFLYDGIEIQADQTPEDLDMEDNDIIEAHREQIGGIIGGEFTTIENQPWFAAIYQRYEGGSEYYRCGGSLISPCWVISATHCFIPQPKKEDYIVYLGRSRLNSNTQGEMKFEVENLILHKDYSADIAAQHNDIALLKIRSKEGRCAQPSRTIQTISLPSMYNDPQFGTSCEITGFGKENSTDRLYPEQLKMTVVKLISHRECQQPHYYGSEVTTKMLCAADPQWKTDSCQGDSGGPLVCSLQGRMTLTGIVSWGRGCALKDKPGVYTRVSHFLPWIRSHTKEENGLALGGSSGGDKTHTCPPCPAPELLGGPSVFLFPPKPKDTLMISRTPEVTCVVVDVSHEDPEVKFNWYVDGVEVHNAKTKPREEQYNSTYRVVSVLTVLHQDWLNGKEYKCKVSNKALPAPIEKTISKAKGQPREPQVYTLPPSRDELTKNQVSLTCLVKGFYPSDIAVEWESNGQPENNYKTTPPVLDSDGSFFLYSKLTVDKSRWQQGNVFSCSVMHEALHNHYTQKSLSLSPG

SEQ ID NO: 1019 - protein, 1002 aa, Artificial Sequence
  uPA N-term-uPA activation-u-PA R35Q/H37Y/R37aE/V38E/T39Y/V41R/D60aP/Y60bQ/T97aI/L 97bA/H99Q/Y149R-HSA
SNELHQVPSNCDCLNGGTCVSNKYFSNIHWCNCPKKFGGQHCEIDKSKTCYEGNGHFYRGKASTDTMGRPCLPWNSATVLQQTYHAHRSDALQLGLGKHNYCRNPDNRRRPWCYVQVGLKPLVQECMVHDCADGKKPSSPPEELKFQCGQKTLRPRFKIIGGEFTTIENQPWFAAIYQRYEGGSEYYRCGGSLISPCWVISATHCFIPQPKKEDYIVYLGRSRLNSNTQGEMKFEVENLILHKDYSADIAAQHNDIALLKIRSKEGRCAQPSRTIQTICLPSMYNDPQFGTSCEITGFGKENSTDRLYPEQLKMTVVKLISHRECQQPHYYGSEVTTKMLCAADPQWKTDSCQGDSGGPLVCSLQGRMTLTGIVSWGRGCALKDKPGVYTRVSHFLPWIRSHTKEENGLALGGSSGGDAHKSEVAHRFKDLGEENFKALVLIAFAQYLQQCPFEDHVKLVNEVTEFAKTCVADESAENCDKSLHTLFGDKLCTVATLRETYGEMADCCAKQEPERNECFLQHKDDNPNLPRLVRPEVDVMCTAFHDNEETFLKKYLYEIARRHPYFYAPELLFFAKRYKAAFTECCQAADKAACLLPKLDELRDEGKASSAKQRLKCASLQKFGERAFKAWAVARLSQRFPKAEFAEVSKLVTDLTKVHTECCHGDLLECADDRADLAKYICENQDSISSKLKECCEKPLLEKSHCIAEVENDEMPADLPSLAADFVESKDVCKNYAEAKDVFLGMFLYEYARRHPDYSVVLLLRLAKTYETTLEKCCAAADPHECYAKVFDEFKPLVEEPQNLIKQNCELFEQLGEYKFQNALLVRYTKKVPQVSTPTLVEVSRNLGKVGSKCCKHPEAKRMPCAEDYLSVVLNQLCVLHEKTPVSDRVTKCCTESLVNRRPCFSALEVDETYVPKEFNAETFTFHADICTLSEKERQIKKQTALVELVKHKPKATKEQLKAVMDDFAAFVEKCCKADDKETCFAEEGKKLVAASQAALGL

SEQ ID NO: 1020 - protein, 326 aa, Homo sapiens
  hIgG2 heavy chain constant
ASTKGPSVFPLAPCSRSTSESTAALGCLVKDYFPEPVTVSWNSGALTSGVHTFPAVLQSSGLYSLSSVVTVPSSNFGTQTYTCNVDHKPSNTKVDKTVERKCCVECPPCPAPPVAGPSVFLFPPKPKDTLMISRTPEVTCVVVDVSHEDPEVQFNWYVDGVEVHNAKTKPREEQFNSTFRVVSVLTVVHQDWLNGKEYKCKVSNKGLPAPIEKTISKTKGQPREPQVYTLPPSREEMTKNQVSLTCLVKGFYPSDIAVEWESNGQPENNYKTTPPMLDSDGSFFLYSKLTVDKSRWQQGNVFSCSVMHEALHNHYTQKSLSLSPGK

SEQ ID NO: 1021 - protein, 377 aa, Homo sapiens
  hIgG3 heavy chain constant
ASTKGPSVFPLAPCSRSTSGGTAALGCLVKDYFPEPVTVSWNSGALTSGVHTFPAVLQSSGLYSLSSVVTVPSSSLGTQTYTCNVNHKPSNTKVDKRVELKTPLGDTTHTCPRCPEPKSCDTPPPCPRCPEPKSCDTPPPCPRCPEPKSCDTPPPCPRCPAPELLGGPSVFLFPPKPKDTLMISRTPEVTCVVVDVSHEDPEVQFKWYVDGVEVHNAKTKPREEQYNSTFRVVSVLTVLHQDWLNGKEYKCKVSNKALPAPIEKTISKTKGQPREPQVYTLPPSREEMTKNQVSLTCLVKGFYPSDIAVEWESSGQPENNYNTTPPMLDSDGSFFLYSKLTVDKSRWQQGNIFSCSVMHEALHNRFTQKSLSLSPGK

SEQ ID NO: 1022 - protein, 327 aa, Homo sapiens
  hIgG4 heavy chain constant
ASTKGPSVFPLAPCSRSTSESTAALGCLVKDYFPEPVTVSWNSGALTSGVHTFPAVLQSSGLYSLSSVVTVPSSSLGTKTYTCNVDHKPSNTKVDKRVESKYGPPCPSCPAPEFLGGPSVFLFPPKPKDTLMISRTPEVTCVVVDVSQEDPEVQFNWYVDGVEVHNAKTKPREEQFNSTYRVVSVLTVLHQDWLNGKEYKCKVSNKGLPSSIEKTISKAKGQPREPQVYTLPPSQEEMTKNQVSLTCLVKGFYPSDIAVEWESNGQPENNYKTTPPVLDSDGSFFLYSRLTVDKSRWQEGNVFSCSVMHEALHNHYTQKSLSLSLGK

SEQ ID NO: 1023 - protein, 227 aa, Homo sapiens
  Immunoglobulin Gamma-1 heavy chain (FC)
DKTHTCPPCPAPELLGGPSVFLFPPKPKDTLMISRTPEVTCVVVDVSHEDPEVKFNWYVDGVEVHNAKTKPREEQYNSTYRVVSVLTVLHQDWLNGKEYKCKVSNKALPAPIEKTISKAKGQPREPQVYTLPPSRDELTKNQVSLTCLVKGFYPSDIAVEWESNGQPENNYKTTPPVLDSDGSFFLYSKLTVDKSRWQQGNVFSCSVMHEALHNHYTQKSLSLSPGK

SEQ ID NO: 1024 - protein, 5 aa, Artificial Sequence
  SSSSG linker
SSSSG

SEQ ID NO: 1025 - protein, 12 aa, Artificial Sequence
  GKSSGSGSESKS linker
GKSSGSGSESKS

SEQ ID NO: 1026 - protein, 15 aa, Artificial Sequence
  GGSTSGSGKSSEGKG linker
GGSTSGSGKSSEGKG

SEQ ID NO: 1027 - protein, 19 aa, Artificial Sequence
  GSTSGSGKSSSEGSGSTKG linker
GSTSGSGKSSSEGSGSTKG

SEQ ID NO: 1028 - protein, 18 aa, Artificial Sequence
  GSTSGSGKPGSGEGSTKG linker
GSTSGSGKPGSGEGSTKG

SEQ ID NO: 1029 - protein, 14 aa, Artificial Sequence
  EGKSSGSGSESKEF  linker
EGKSSGSGSESKEF

SEQ ID NO: 1030 - protein, 4 aa, Artificial Sequence
  AAPA  linker
AAPA

SEQ ID NO: 1031 - protein, 100 aa, Artificial Sequence
  SUMO
GSLQDSEVNQEAKPEVKPEVKPETHINLKVSDGSSEIFFKIKKTTPLRRLMEAFAKRQGKEMDSLRFLYDGIRIQADQAPEDLDMEDNDIIEAHREQIGG

SEQ ID NO: 1032 - protein, 108 aa, Artificial Sequence
  DG-6xHIS-SUMO
DGHHHHHHGSLQDSEVNQEAKPEVKPEVKPETHINLKVSDGSSEIFFKIKKTTPLRRLMEAFAKRQGKEMDSLTFLYDGIEIQADQTPEDLDMEDNDIIEAHREQIGG

SEQ ID NO: 1033 - protein, 100 aa, Artificial Sequence
  SUMO
GSLQDSEVNQEAKPEVKPEVKPETHINLKVSDGSSEIFFKIKKTTPLRRLMEAFAKRQGKEMDSLTFLYDGIEIQADQTPEDLDMEDNDIIEAHREQIGG

SEQ ID NO: 1034 - protein, 505 aa, Artificial Sequence
  hIL2ss-uPA -FC
MYRMQLLSCIALSLALVTNSIIGGEFTTIENQPWFAAIYRRHRGGSVTYVCGGSLISPCWVISATHCFIDYPKKEDYIVYLGRSRLNSNTQGEMKFEVENLILHKDYSADTLAHHNDIALLKIRSKEGRCAQPSRTIQTISLPSMYNDPQFGTSCEITGFGKENSTDYLYPEQLKMTVVKLISHRECQQPHYYGSEVTTKMLCAADPQWKTDSCQGDSGGPLVCSLQGRMTLTGIVSWGRGCALKDKPGVYTRVSHFLPWIRSHTKEENGLALGGSSGGDKTHTCPPCPAPELLGGPSVFLFPPKPKDTLMISRTPEVTCVVVDVSHEDPEVKFNWYVDGVEVHNAKTKPREEQYNSTYRVVSVLTVLHQDWLNGKEYKCKVSNKALPAPIEKTISKAKGQPREPQVYTLPPSRDELTKNQVSLTCLVKGFYPSDIAVEWESNGQPENNYKTTPPVLDSDGSFFLYSKLTVDKSRWQQGNVFSCSVMHEALHNHYTQKSLSLSPG

SEQ ID NO: 1035 - protein, 867 aa, Artificial Sequence
  hIL2ss-uPA -HSA
MYRMQLLSCIALSLALVTNSIIGGEFTTIENQPWFAAIYRRHRGGSVTYVCGGSLISPCWVISATHCFIDYPKKEDYIVYLGRSRLNSNTQGEMKFEVENLILHKDYSADTLAHHNDIALLKIRSKEGRCAQPSRTIQTISLPSMYNDPQFGTSCEITGFGKENSTDYLYPEQLKMTVVKLISHRECQQPHYYGSEVTTKMLCAADPQWKTDSCQGDSGGPLVCSLQGRMTLTGIVSWGRGCALKDKPGVYTRVSHFLPWIRSHTKEENGLALGGSSGGDAHKSEVAHRFKDLGEENFKALVLIAFAQYLQQCPFEDHVKLVNEVTEFAKTCVADESAENCDKSLHTLFGDKLCTVATLRETYGEMADCCAKQEPERNECFLQHKDDNPNLPRLVRPEVDVMCTAFHDNEETFLKKYLYEIARRHPYFYAPELLFFAKRYKAAFTECCQAADKAACLLPKLDELRDEGKASSAKQRLKCASLQKFGERAFKAWAVARLSQRFPKAEFAEVSKLVTDLTKVHTECCHGDLLECADDRADLAKYICENQDSISSKLKECCEKPLLEKSHCIAEVENDEMPADLPSLAADFVESKDVCKNYAEAKDVFLGMFLYEYARRHPDYSVVLLLRLAKTYETTLEKCCAAADPHECYAKVFDEFKPLVEEPQNLIKQNCELFEQLGEYKFQNALLVRYTKKVPQVSTPTLVEVSRNLGKVGSKCCKHPEAKRMPCAEDYLSVVLNQLCVLHEKTPVSDRVTKCCTESLVNRRPCFSALEVDETYVPKEFNAETFTFHADICTLSEKERQIKKQTALVELVKHKPKATKEQLKAVMDDFAAFVEKCCKADDKETCFAEEGKKLVAASQAALGLSPG

SEQ ID NO: 1036 - protein, 663 aa, Artificial Sequence
  IgGkSP-uPA N-term-furin activation-u-PA R35Q/H37Y/R37aE/V38E/T39Y/V41R/D60aP/Y60bQ/T97aI/L 97bA/H99Q/Y149R-linker-Fc
METDTLLLWVLLLWVPGSTGSNELHQVPSNCDCLNGGTCVSNKYFSNIHWCNCPKKFGGQHCEIDKSKTCYEGNGHFYRGKASTDTMGRPCLPWNSATVLQQTYHAHRSDALQLGLGKHNYCRNPDNRRRPWCYVQVGLKPLVQECMVHDCADGKKPSSPPEELKFQCGQKTLRRRKRIIGGEFTTIENQPWFAAIYQRYEGGSEYYRCGGSLISPCWVISATHCFIPQPKKEDYIVYLGRSRLNSNTQGEMKFEVENLILHKDYSADIAAQHNDIALLKIRSKEGRCAQPSRTIQTICLPSMYNDPQFGTSCEITGFGKENSTDRLYPEQLKMTVVKLISHRECQQPHYYGSEVTTKMLCAADPQWKTDSCQGDSGGPLVCSLQGRMTLTGIVSWGRGCALKDKPGVYTRVSHFLPWIRSHTKEENGLALGGSSGGDKTHTCPPCPAPELLGGPSVFLFPPKPKDTLMISRTPEVTCVVVDVSHEDPEVKFNWYVDGVEVHNAKTKPREEQYNSTYRVVSVLTVLHQDWLNGKEYKCKVSNKALPAPIEKTISKAKGQPREPQVYTLPPSRDELTKNQVSLTCLVKGFYPSDIAVEWESNGQPENNYKTTPPVLDSDGSFFLYSKLTVDKSRWQQGNVFSCSVMHEALHNHYTQKSLSLSPG

SEQ ID NO: 1037 - protein, 361 aa, Artificial Sequence
  HHHHHH-SUMO-uPA R35Q/H37Y/R37aE/V38E/T39Y/V41R/D60aP/Y60bQ/T97aI/L 97bA/H99Q/Y149R
MGHHHHHHGSLQDSEVNQEAKPEVKPEVKPETHINLKVSDGSSEIFFKIKKTTPLRRLMEAFAKRQGKEMDSLRFLYDGIRIQADQAPEDLDMEDNDIIEAHREQIGGIIGGEFTTIENQPWFAAIYQRYEGGSEYYRCGGSLISPCWVISATHCFIPQPKKEDYIVYLGRSRLNSNTQGEMKFEVENLILHKDYSADIAAQHNDIALLKIRSKEGRCAQPSRTIQTICLPSMYNDPQFGTSCEITGFGKENSTDRLYPEQLKMTVVKLISHRECQQPHYYGSEVTTKMLCAADPQWKTDSCQGDSGGPLVCSLQGRMTLTGIVSWGRGCALKDKPGVYTRVSHFLPWIRSHTKEENGLAL

SEQ ID NO: 1038 - protein, 361 aa, Artificial Sequence
  HHHHHH-SUMO-uPA R35Q/H37Y/R37aE/V38E/T39Y/V41R/D60aP/Y60bQ/T97aI/L 97bA/H99Q/C122S/Y149R
MGHHHHHHGSLQDSEVNQEAKPEVKPEVKPETHINLKVSDGSSEIFFKIKKTTPLRRLMEAFAKRQGKEMDSLRFLYDGIRIQADQAPEDLDMEDNDIIEAHREQIGGIIGGEFTTIENQPWFAAIYQRYEGGSEYYRCGGSLISPCWVISATHCFIPQPKKEDYIVYLGRSRLNSNTQGEMKFEVENLILHKDYSADIAAQHNDIALLKIRSKEGRCAQPSRTIQTISLPSMYNDPQFGTSCEITGFGKENSTDRLYPEQLKMTVVKLISHRECQQPHYYGSEVTTKMLCAADPQWKTDSCQGDSGGPLVCSLQGRMTLTGIVSWGRGCALKDKPGVYTRVSHFLPWIRSHTKEENGLAL

SEQ ID NO: 1039 - protein, 366 aa, Artificial Sequence
  HHHHHH-SUMO-uPA R35Q/H37Y/R37aE/V38E/T39Y/V41R/D60aP/Y60bQ/T97aI/L 97bA/H99Q/C122S/Y149R-GGSCK
MGHHHHHHGSLQDSEVNQEAKPEVKPEVKPETHINLKVSDGSSEIFFKIKKTTPLRRLMEAFAKRQGKEMDSLRFLYDGIRIQADQAPEDLDMEDNDIIEAHREQIGGIIGGEFTTIENQPWFAAIYQRYEGGSEYYRCGGSLISPCWVISATHCFIPQPKKEDYIVYLGRSRLNSNTQGEMKFEVENLILHKDYSADIAAQHNDIALLKIRSKEGRCAQPSRTIQTISLPSMYNDPQFGTSCEITGFGKENSTDRLYPEQLKMTVVKLISHRECQQPHYYGSEVTTKMLCAADPQWKTDSCQGDSGGPLVCSLQGRMTLTGIVSWGRGCALKDKPGVYTRVSHFLPWIRSHTKEENGLALGGSCK

SEQ ID NO: 1040 - protein, 875 aa, Artificial Sequence
  IgGkSP-furin activation-uPA R35Q/H37Y/R37aE/V38E/T39Y/V41R/D60aP/Y60bQ/T97aI/L 97bA/H99Q/C122S/Y149R-linker-HSA
METDTLLLWVLLLWVPGSTGQSGQKTLRRKRIIGGEFTTIENQPWFAAIYQRYEGGSEYYRCGGSLISPCWVISATHCFIPQPKKEDYIVYLGRSRLNSNTQGEMKFEVENLILHKDYSADIAAQHNDIALLKIRSKEGRCAQPSRTIQTISLPSMYNDPQFGTSCEITGFGKENSTDRLYPEQLKMTVVKLISHRECQQPHYYGSEVTTKMLCAADPQWKTDSCQGDSGGPLVCSLQGRMTLTGIVSWGRGCALKDKPGVYTRVSHFLPWIRSHTKEENGLALGGSSGGDAHKSEVAHRFKDLGEENFKALVLIAFAQYLQQCPFEDHVKLVNEVTEFAKTCVADESAENCDKSLHTLFGDKLCTVATLRETYGEMADCCAKQEPERNECFLQHKDDNPNLPRLVRPEVDVMCTAFHDNEETFLKKYLYEIARRHPYFYAPELLFFAKRYKAAFTECCQAADKAACLLPKLDELRDEGKASSAKQRLKCASLQKFGERAFKAWAVARLSQRFPKAEFAEVSKLVTDLTKVHTECCHGDLLECADDRADLAKYICENQDSISSKLKECCEKPLLEKSHCIAEVENDEMPADLPSLAADFVESKDVCKNYAEAKDVFLGMFLYEYARRHPDYSVVLLLRLAKTYETTLEKCCAAADPHECYAKVFDEFKPLVEEPQNLIKQNCELFEQLGEYKFQNALLVRYTKKVPQVSTPTLVEVSRNLGKVGSKCCKHPEAKRMPCAEDYLSVVLNQLCVLHEKTPVSDRVTKCCTESLVNRRPCFSALEVDETYVPKEFNAETFTFHADICTLSEKERQIKKQTALVELVKHKPKATKEQLKAVMDDFAAFVEKCCKADDKETCFAEEGKKLVAASQAALGL

SEQ ID NO: 1041 - protein, 10 aa, Artificial Sequence
  Furin activation sequence
QSGKTLRRKR

SEQ ID NO: 1042 - protein, 146 aa, uPA N-terminus
SNELHQVPSNCDCLNGGTCVSNKYFSNIHWCNCPKKFGGQHCEIDKSKTCYEGNGHFYRGKASTDTMGRPCLPWNSATVLQQTYHAHRSDALQLGLGKHNYCRNPDNRRRPWCYVQVGLKPLVQECMVHDCADGKKPSSPPEELKF

SEQ ID NO: 1043 - protein, 255 aa, Artificial Sequence
  Chain A, IG GAMMA-1 CHAIN C REGION
MKKTAIAIAVALAGFATVAQADVESKSCDKTHTCPPCPAPELLGGPSVFLFPPKPKDTLMISRTPEVTCVVVDVSHEDPEVKFNWYVDGVEVHNAKTKPREEQYNSTYRVVSVLTVLHQDWLNGKEYKCKVSNKALPAPIEKTISKAKGQPREPQVYTLPPSRDELTKNQVSLTCLVKGFYPSDIAVEWESNGQPENNYKTTPPVLDSDGSFFLYSKLTVDKSRWQQGNVFSCSVMHEALHNHYTQKSLSLSPGK

SEQ ID NO: 1044 - protein, 11 aa, Artificial Sequence
  Furin
QSGQKTLRRKR

1. A modified urokinase-type plasminogen activator (u-PA) polypeptide, comprising one or more amino acid modifications selected from among replacements corresponding to R35Q, H37Y, V41R, V41L, Y40Q, D60aP, L97bA, T97aI and H99Q, and conservative amino acid modifications therefor, whereby the modified u-PA polypeptide has increased activity/specificity for a complement protein compared to the unmodified active form of the u-PA polypeptide, wherein:
the amino acid modifications are selected from among replacements, insertions and deletions in the primary sequence of the modified u-PA polypeptide;
the modified u-PA polypeptide cleaves a complement protein to thereby inhibit or reduce complement activation compared to the unmodified u-PA polypeptide that does not contain the amino acid modifications;
the complement protein is C3;
the modified u-PA polypeptide has reduced activity or specificity for cleavage of a substrate sequence in plasminogen compared to the unmodified u-PA polypeptide;
the modified u-PA polypeptide has at least 90% sequence identity with the polypeptides of any of SEQ ID NOs: 1-6;
residues are numbered by chymotrypsin numbering;
the unmodified u-PA polypeptide comprises the sequence set forth in any of SEQ ID NOs: 1-6, which sets forth wild-type (WT) full-length u-PA, WT protease domain u-PA, WT mature u-PA, full-length u-PA with a C122S, by chymotrypsin numbering, protease domain u-PA with C122S, mature u-PA with C122S, or a catalytically active fragment thereof that includes the amino acid replacement(s); and
the conservative modifications are selected from among R35Y, W, F or N; H37R, Q, E, W or F; V41K; D60aS; T97aD, L or V; L97bG or S, and H99N.

2. The modified u-PA polypeptide of claim 1 that cleaves within residues QHARASHLG (residues 737-745) of human C3 (SEQ ID NO:47).

3. The modified u-PA polypeptide of claim 1 that has increased activity for cleavage of C3 that is least 3-fold greater than the unmodified u-PA polypeptide comprising the protease domain of SEQ ID NO:5, or a corresponding form of u-PA set forth in any of SEQ ID NOs: 1-4 and 6.

4. The modified u-PA polypeptide of any claim 1, wherein:
the modified u-PA polypeptide has ED₅₀ for inactivation cleavage of C3 of less than or 100 nM, or 50 nM or 30 nM or 25 nM in an in vitro assay; and
the modified u-PA polypeptide has stability of greater than 50% or 80% after incubation in PBS, or a body fluid for 7 days.

5. The modified u-PA polypeptide of claim 1, wherein the unmodified u-PA polypeptide consists of the sequence of amino acids set forth in any of SEQ ID NOs: 1-6.

6. The modified u-PA polypeptide of claim 1 that has 1 or up to 2, 3, 4, 5, 6, 7, 8, 9, 10, 11, 12, 13, 14, 15, 16, 17, 18, 19, or 20 amino acid replacements, insertions or deletions, compared to the unmodified u-PA polypeptide of any of SEQ ID NOs: 1-6 or a catalytically active portion thereof.

7. The modified u-PA polypeptide of claim 1, comprising one or more amino acid modifications selected from among replacements corresponding to R35Q, H37Y, V41R, V41L, Y40Q, D60aP, L97bA, T97aI, and H99Q.

8. The modified u-PA polypeptide of claim 7, comprising V41R or V41L and one or more of the replacements L97bA, R35Q, H99Q, D60aP, and T97aI.

9. The modified u-PA polypeptide of claim 1, comprising the replacement V41R or V41L, and optionally C122S.

10. The modified u-PA polypeptide of claim 1, further comprising the replacement V38E.

11. The modified u-PA polypeptide of claim 7, comprising the replacement H37Y.

12. The modified u-PA polypeptide of claim 1, comprising the modifications V38E/V41R.

13. The modified u-PA polypeptide of claim 1, comprising the replacements R35 Y/H37S/V38E/V41R or R35 Y/H37Y/V38E/V41R.

14. The modified u-PA polypeptide of claim 1, comprising the replacements H37Y/V38E, R35Y/H37K, R35Q/H37K, R35Q/H37Y, V38E/V41R, V38E/V41R/Y149R, T39Y/V41R/D60aP/L97bA/H99Q/C122S, T39Y/V41R/D60aP/L97bA/H99Q, T39Y/V41R/Y60bQ/L97bA/H99Q or T39Y/V41R/Y60bQ/L97bA/H99Q/C122S.

15. The modified u-PA polypeptide of claim 1, comprising the amino acid modifications R35Q/H37Y/T39Y/V41R, R35Q/H37Y/T39Y/V41R/C122S, R35Q/H37Y/T39Y/V41R/L97bA/H99Q/C122S, or R35Q/H37Y/T39Y/V41R/L97bA/H99Q.

16. The modified u-PA polypeptide of claim 1, comprising the modifications selected from:
R35Y/H37S/R37aP/V38E/T39Y/V41R/D60aP/Y60bD/T97aI/L97bA/H99Q/C122S/Y151L;
R35W/R36Q/H37S/V38P/T39Y/V41R/Y60bN/T97aE/L97bA/H99Q/C122S/Y149R/Y151L;
F30Y/R35Y/R36H/H37K/V38E/T39F/Y40F/V41R/K82R/T97aI/L97bA/H99Q/K110aR/C122S/Y149R/M157K;
F30Y/R35Y/R36H/H37K/V38E/T39F/Y40F/V41R/T97aI/L97bA/H99Q/C122S/Y149R/M157K/K179R;
F30Y/R35Y/R36H/H37K/V38E/T39F/Y40F/V41R/K92R/T97aI/L97bA/H99Q/C122S/Y149R/M157K;
F30Y/R35V/R36H/H37G/V38E/T39W/Y40H/V41R/Y60bW/T97aI/L97bA/H99Q/C122S/Y149E/M157K;
F30Y/R35Y/R36H/H37K/V38E/T39F/Y40F/V41R/K92S/T97aI/L97bA/H99Q/C122S/Y149R/M157K;
F30Y/R35Y/R36H/H37K/V38E/T39F/Y40F/V41R/K61R/K62R/T97aI/L97bA/H99Q/C122S/Y149R/M 157K;
F30Y/R35Y/R36H/H37K/V38E/T39F/Y40F/V41R/T97aI/L97bA/H99Q/C122S/Y149R/M157K/K179S;
R35W/H37P/R37aN/V38E/T39Y/V41R/D60aP/Y60bL/T97aI/L97bA/H99Q/C122S;
F30Y/R35W/R36T/H37S/V38S/T39Y/Y40L/V41R/Y60bN/T97aE/L97bA/H99Q/C122S/Y149R/Y151L/M157R/Q192Y;
F30Y/R35Y/R36H/H37K/V38E/T39F/Y40F/V41R/T97aI/L97bA/H99Q/C122S/M157K;
F30Y/R35Y/R36H/H37K/V38E/T39F/Y40F/V41R/K61 S/K62S/T97aI/L97bA/H99Q/C122S/Y149R/M157K;
R35A/H37E/R37aG/V38E/T39Y/V41R/D60aP/Y60bD/T97aI/L97bA/H99Q/C122S/Y151L;
R35W/R36Q/H37S/V38T/T39Y/Y40H/V41R/Y60bN/T97aE/L97bA/H99Q/C122S/Y149R/Y151P/M157R;
F30Y/R35W/H37Y/V38E/T39Y/Y40H/V41R/Y60bN/T97aE/L97bA/H99Q/C122S/Y149R;
V38E/T39W/V41R/D60aW/Y60bP/L97bG/H99L/C122S;
R35W/R36K/H37S/V38E/T39Y/Y40L/V41R/Y60bN/T97aE/L97bA/H99Q/C122S/Y149R/Y151L/M157S/Q192H;
R35Q/H37Y/R37aP/V38E/T39Y/V41R/D60aQ/Y60bP/T97aI/L97bA/H99Q/C122S/Y149R;
I17V/F30Y/R35Q/R36H/H37W/V38E/Y40H/V41R/T97aI/L97bA/H99Q/C122S/M157K/T158A;
R35Y/H37S/R37aP/V38E/T39Y/V41R/D60aP/Y60bD/T97aI/L97bA/H99Q/C122S/Y151L/Q192H;
F30Y/R35W/R36H/H37D/V38E/T39Y/Y40F/V41R/T97aI/L97bA/H99Q/C122S/Y149R/M157K;
R35W/R36N/H37S/V38E/T39Y/Y40M/V41R/Y60bN/T97aE/L97bA/H99Q/C122S/Y149R/M157S;
R35Y/H37D/V38E/T39W/V41R/D60aP/Y60bE/T97aI/L97bA/H99Q/C122S/Y149R;
F30Y/R35Y/R36H/H37K/V38E/T39F/Y40F/V41R/K82S/T97aI/L97bA/H99Q/K110aS/C122S/Y149R/M157K;
R35W/H37P/R37aN/V38E/T39Y/V41R/D60aP/Y60bL/D97T/T97aE/L97bG/A98S/H99L/C122S;
F30Y/R35Y/R36H/H37K/V38E/T39F/Y40F/V41R/T97aI/L97bA/H99Q/Y149R/M157K;
R35Y/H37S/R37aP/V38E/T39Y/V41R/D60aP/Y60bD/T97aI/L97bA/H99Q/C122S;
F30Y/R35W/H37S/V38E/T39Y/Y40H/V41R/Y60bN/T97aI/L97bA/H99Q/C122S/Y149R/M157K;
F30Y/R35W/H37S/V38E/T39Y/Y40H/V41R/Y60bN/T97aE/L97bA/H99Q/C122S/M157K;
R35H/V38E/T39Y/V41R/D60aP/Y60bQ/L97bA/H99Q/C122S/T158A;
R35Q/R36H/H37Y/V38E/T39Y/Y40L/V41R/T97aI/L97bA/H99Q/C122S/Y149R/M157K;
R35W/H37P/R37aG/V38E/T39Y/V41R/D60aP/Y60bE/T97aI/L97bA/H99Q/C122S/Y149R;
V38D/V41Q/D60aH/Y60bS/T97aW/L97bR/H99E/C122S/Y151L/E175D/R217E/K224R;
F30Y/R35W/R36H/H37P/R37aQ/V38E/T39Y/Y40F/V41R/Y60bQ/T97aE/L97bA/H99Q/C122S/Y149R/M157K;
F30Y/R35W/R36Q/H37S/V38P/T39Y/Y40L/V41R/Y60bN/T97aE/L97bA/H99Q/C122S/Y149R/M157R;
F30H/R35W/R36T/H37S/V38P/T39Y/V41R/Y60bN/T97aE/L97bA/H99Q/C122S/Y149R/Y151L/M157 S;
F30Y/R35W/R36H/H37D/V38E/T39Y/Y40H/V41R/Y60bD/T97aI/L97bA/H99Q/C122S/M157K;
F30Y/R35Y/R36H/H37N/V38E/T39F/Y40F/V41R/K61E/R72H/T97aI/L97bA/H99Q/C122S/Y149R/M157K/Q169K;
R35W/R36Q/H37S/V38S/T39Y/V41R/Y60bN/T97aE/L97bA/H99Q/C122S/Y149R/Y151L/M157S/Q192H;
R35W/H37G/R37aE/V38E/T39Y/V41R/D60aP/Y60bD/T97a/L97bA/H99Q/C122S/Y151L/Q192T;
R35W/H37P/R37aN/V38E/T39Y/V41R/D60aP/Y60bL/T97aI/L97bA/H99Q/C122S/Y149R;
F30Y/R35W/H37S/V38E/T39Y/Y40H/V41R/Y60bN/T97aE/L97bA/H99Q/C122S;
F30Y/R35V/R36H/H37G/V38E/T39W/Y40H/V41R/Y60bA/T97aI/L97bA/H99Q/C122S/Y149R/M157K;
F30Y/R35W/R36H/H37S/V38E/T39Y/Y40H/V41R/Y60bN/T97aE/L97bA/H99Q/C122S/Y149R;
F30Y/R35W/H37S/V38E/T39Y/Y40H/V41R/Y60bN/T97aE/L97bA/H99Q/C122S/Y149R;
F30Y/R35W/R36H/H37S/V38E/T39Y/Y40H/V41R/Y60bN/T97aE/L97bA/H99Q/C122S/M157K;
F30Y/R35W/R36H/H37S/V38E/T39Y/Y40H/V41R/Y60bN/T97aE/L97bA/H99Q/C122S;
F30Y/R35W/R36S/H37S/V38Q/T39Y/Y40L/V41R/Y60bN/T97aE/L97bA/H99Q/C122S/Y149R/Y151L/M157S/Q192N;
F30Y/R35W/R36H/H37P/R37aD/V38E/T39Y/Y40F/V41R/D60aE/Y60bS/T97aE/L97bA/H99Q/C122S/Y149R/M157K;
R35Q/H37Y/R37aS/V38E/T39Y/V41R/D60aP/Y60bE/T97aI/L97bA/H99Q/C122S/Y149R;
R37aS/V38E/Y40V/V41R/H99L/C122S/Y151L/R217V;
V38D/V41R/L97bG/H99Q/C122S/Y151L/R217E;
R35Q/H37Y/R37aE/V38E/T39Y/V41R/D60aP/Y60bQ/T97aI/L97bA/H99Q/C122S;
F30Y/R35V/R36H/H37D/V38E/T39W/Y40H/V41R/Y60bP/T97aI/L97bA/H99Q/C122S/Y149R/M157K;
I17V/F30Y/R35Q/R36H/H37W/V38E/Y40H/V41R/T97aI/L97bA/H99Q/C122S/M157K;
F30Y/R35V/R36H/H37S/V38E/T39F/Y40H/V41R/Y60bS/T97aM/L97bA/H99Q/C122S/Y149W/M157K;
R35Y/H37S/R37aP/V38E/T39Y/V41R/D60aP/Y60bD/T97aI/L97bA/H99Q/C122S/Y149R;
N26D/F30Y/R35Y/R36H/H37E/V38E/T39F/Y40F/V41R/K61E/T97aI/L97bA/H99Q/R110dS/P114S/C122S/Y149R1M157K;
F30Y/R35W/R36H/H37P/R37aE/V38E/T39Y/Y40F/V41R/Y60bA/T97aE/L97bA/H99Q/C122S/Y149R/M157K;
R35L/H37D/R37aN/V38E/T39Y/V41R/D60aP/T97aI/L97bA/H99Q/C122S/Y149R;
F30Y/R35W/R36H/H37P/V38E/T39Y/Y40F/V41R/Y60bS/T97aE/L97bA/H99Q/C122S/Y149K/M157K;
R35Q/H37Y/R37aE/V38E/T39Y/V41R/D60aP/T97aI/L97bA/H99Q/C122S/Y149R;
R35H/V38E/T39Y/V41R/D60aP/Y60bQ/L97bA/H99Q/C122S/T158S/E167K;
R35Q/H37Y/V38E/T39Y/V41R/D60aP/Y60bQ/T97a/L97bA/H99Q/C122S/Y149R;
F30Y/R35Y/R36H/H37D/V38E/T39W/Y40H/V41R/Y60bE/T97aI/L97bA/H99Q/C122S/Y149R1M157K;
F30Y/R35Y/R36H/H37K/V38E/T39F/Y40F/V41R/T97aI/L97bA/H99Q/C122S/Y149R/M157K;
F30Y/R35Y/R36H/H37E/V38E/T39F/Y40F/V41R/K61E/T97a/L97bA/H99Q/C122S/Y149R/M157K/T 242A;
F30Y/R35L/V38D/Y40H/V41R/L97bA/H99Q/C122S/M157K/T158A;
F30Y/R35Y/R36H/H37P/R37aQ/V38E/T39Y/Y40F/V41R/Y60bH/T97aE/L97bA/H99Q/C122S/Y149R/M157K;
V38D/V41R/L97bR/H99E/C122S/Y151L/R217E;
H37G/R37aD/G37bD/V38F/T39H/V41R/Y60bK/T97aS/L97bR/H99E/C122S/Y151L/E175D/R217E/K224R;
R35Y/H37V/R37aW/V38E/T39Y/V41R/D60aP/Y60bE/T97a/L97bA/H99Q/C122S/Y151L/Q192T;
F30Y/R35M1R36H/H37G/V38E/T39F/Y40H/V41R/Y60bP/T97aF/L97bA/H99Q/C122S/Y149R/M157K;
F30Y/R35W/R36Q/H37S/V38T1T39Y/Y40L/V41R/Y60bN/T97aE/L97bA/H99Q/C122S/Y149R/Y151L/M157K/Q192T;
R35W/H37D/R37aP/V38E/T39W/V41R/D60aR/Y60bS/T97aI/L97bA/H99Q/C122S/Y149R;
I17V/F30Y/R35W/R36H/H37E/V38E/T39W/Y40H/V41R/Y60bQ/T97aE/L97bA/H99Q/C122S/Y149K/M157K;
I17V/F30Y/R35Q/H37W/V38D/Y40H/V41R/Y60bN/L97bA/H99Q/C122S/Y149H/M157K/T158A;
R35H/V38E/T39Y/V41R/D60aP/Y60bQ/L97bA/H99Q/C122S/I138V/E167K;
F30Y/R35W/R36Q/H37S/V38E/T39Y/Y40L/V41R/Y60bN/T97aE/L97bA/H99Q/C122S/Y149R/Y151L/M157T/Q192H;
R35H/G37bD/V38E/T39Y/V41R/D60aP/Y60bQ/L97bA/H99Q/C122 S/T158S;
R35H/H37P/R37aG/V38E/T39F/V41R/D60aP/Y60bE/T97aI/L97bA/H99Q/C122S/Y149R;
F30Y/R35W/R36H/H37S/V38E/T39Y/Y40H/V41R/Y60bN/T97aE/L97bA/H99Q/C122S/Y149R/M157K;
V38D/T39Y/Y40L/V41R/L97bI/H99E/C122S/R217E;
F30Y/R36H/V38E/Y40H/V41R/T97aI/L97bA/H99Q/C122S/M157K/T158A;
F30H/R35W/R36H/H375/V38E/T39Y/Y40M/V41R/Y60bN/T97aE/L97bA/H99Q/C122S/Y149R/M157K;
R35V/R36H/H37D/V38E/T39W/Y40M/V41R/T97aI/L97bA/H99Q/C122S/Y149R/M157K;
R35W/R36K/H37S/V38A/T39Y/V41R/Y60bN/T97aE/L97bA/H99Q/C122S/Y149R/Y115L/M157R/Q192T;
F30Y/R35W/R36H/H37D/V38E/T39Y/Y40H/V41R/Y60bA/T97aI/L97bA/H99Q/C122S/Y149R/M157K;
F30Y/R35W/R36H/H37S/V38E/T39Y/Y40F/V41R/Y60bN/T97aE/L97bA/H99Q/C122S/N145 S/S146V/T147M/D148G/Y149Q/L150F/M157K;
F30Y/R35Y/R36H/H37K/V38E/T39F/Y40F/V41R/T97aI/L97bA/H99Q/Y149R/M157K;
F30Y/R35I/R36H/H37D/V38E/T39F/Y40F/V41R/T97aI/L97bA/H99Q/C122S/Y149R/M157K;
R35V/V38E/Y40Q/V41L/Y60bS/T97aE/L97bA/H99Q/C122S/Y149R;
R35Q/H37Y/R37aP/V38E/T39Y/V41R/D60aN/Y60bN/T97aI/L97bA/H99Q/C122S/Y149R;
V38E/Y40Q/V41L/L97bG/H99Q/C122S/R217T;
R35H/V38E/T39Y/V41R/T56S/D60aP/Y60bQ/L97bA/H99Q/C122S/T158S;
F30H/R35Q/H37W/V38D/V41R/L97bA/H99Q/C122S/Y151L/M157K;
R35Q/H37Y/V38E/T39Y/V41R/D60aP/T97aI/L97bA/H99Q/C122S/Y149R;
R35W/H37P/R37aN/V38E/T39Y/V41K/D60aP/Y60bD/T97a/L97bA/H99Q/C122S/Y151L/Q192A;
V38D/V41R/Y60bR/T97aW/L97bR/H99E/C122S/E175D/R217E/K224R;
F30Y/R35W/R36H/H37S/V38E/Y40H/Y60bN/T97aI/L97bA/H99Q/C122S/Y149R;
V38D/V41L/Y60bP/T97aM/L97bR/H99E/C122S/Y151L/E175D/R217E/K224R;
F30Y/R35W/R36H/H37D/V38E/T39F/Y40H/V41R/Y60bE/T97aI/L97bA/H99Q/C122S/Y149R/M157K;
F30Y/R35W/R36H/H37N/V38E/T39Y/Y40F/V41R/Y60bS/T97aE/L97bA/H99Q/C122S/Y1491K/M157K;
F30Y/R35W/R36K/H37S/V38D/T39Y/Y40L/V41R/Y60bN/T97aE/L97bA/H99Q/C122S/Y149R/Y151L/M157R/Q192T;
V41R/H99Q/C122S/Y151L/R217V;
V38E/Y40P/V41L/L97bG/H99L/C122S/Y151Q/R217E;
V38E/Y40L/V41R/H99L/C122S/Y151L/R217S;
V38E/Y40Q/V41L/L97bG/H99Q/C122S/Y151P/R217T;
V38E/T39Y/V41R/D60aW/Y60bP/L97bR/H991/C122S;
R35W/H37D/R37aP/V38E/T39W/V41R/Y60bA/T97aI/L97bA/H99Q/C122S/Y149R;
F30Y/R36H/H37F/V38E/T39Y/Y40H/V41R/Y60bD/T97aV/L97bA/H99Q/C122S/Y149L/M157K;
F30Y/R35W/R36H/H37E/S37dP/V38E/T39W/Y40H/V41R/Y60bQ/T97aE/L97bA/H99Q/C122S/Y149K/M157K;
R35Q/H37Y/R37aE/V38E/T39Y/V41R/D60aA/Y60bP/T97aI/L97bA/H99Q/C122S/Y149R;
R36H/V38D/V41R/A96D/D97E/A98G/T97adeI/H99L/L97bdeI/C122S/T178 S/R217D;
V38D/V41R/L97bG/H99Q/C122S/Y151L/R217A;
F30H/R35Q/R36H/H37Y/V38E/T39Y/Y40L/V41R/T97aI/L97bA/H99Q/C122S/Y149R/M157K;
F30Y/R35W/R36K/H37E/V38E/T39W/Y40H/V41R/Y60bQ/K61E/I165T/T97aE/L97bA/H99Q/C122S/Y149K/M157K;
F30Y/R35W/R36H/H37D/V38E/T39Y/Y40H/V41R/Y60bS/T97aL/L97bA/H99Q/C122S/Y149L/M157K;
F30Y/R35Q/R36H/H37Y/R37aE/V38E/T39Y/Y40F/V41R/D60aS/Y60bP/T97aE/L97bA/H99Q/C122S/Y149R/M157K;
R35Q/H37Y/R37aE/V38E/T39Y/V41R/D60aG/Y60bS/T97aI/L97bA/H99Q/C122S/Y149R;
I24N/F30Y/R35W/R36H/H37E/V38E/T39W/Y40L/V41R/Y60bQ/N87D/T97aE/L97bA/H99Q/C122S/Y149K/M157K;
V38E/Y40Q/V41L/L97bA/H99Q/C122S;
F30Y/R35Q/H37W/V38D/Y40H/V41R/Y60bN/L97bA/H99Q/C122S/Y149H/M157K/T158A;
F30Y/R35W/R36A/H37E/V38E/T39W/Y40H/V41R/Y60bQ/K61D/165R/T97aE/L97bA/H99Q/C122S/Y149K/M157K;
F30Y/R35Q/R36H/H37W/V38E/Y40H/V41R/T97aI/L97bA/H99Q/C122S/M157K;
F30Y/R35Y/R36H/H37K/V38E/T39F/Y40F/V41R/T97aI/L97bA/H99Q/C122S/Y149R/M157K/K187R/K223R/K224R;
R35W/R36Q/H37S/V38E/T39Y/Y40L/V41R/Y60bN/T97aE/L97bA/H99Q/C122S/Y149R/Y151L/M157S/Q192T;
R35H/V38E/T39Y/V41R/D60aP/Y60bQ/P60cS/L97bA/H99Q/C122S/I138V/E167K;
R35Q/H37Y/R37aE/V38E/T39Y/V41R/D60aT/Y60bT/T97aI/L97bA/H99Q/C122S/Y149R;
I17V/F30Y/R36H/V38E/Y40H/V41R/T97aI/L97bA/H99Q/C122S/M157K;
R35Y/R36H/H37K/V38E/T39F/V41R/T97a/L97bA/H99Q/C122S/Y149R/M157K;
R35H/V38E/T39Y/V41R/T56A/D60aP/Y60bQ/L97bA/H99Q/C122S;
F30Y/V38D/Y40F/V41L/L97bA/H99Q/C122S/Y151L/M157R;
V38E/Y40A/V41L/L97bG/H99Q/C122S/R217T;
I24T/F30Y/R35W/R36H/H37E/V38E/T39W/Y40H/V41R/Y60bQ/T97aE/L97bA/H99Q/C122S/Y149K/M157K;
F30Y/R35W/R36H/H37S/V38E/T39Y/Y40F/V41R/Y60bN/T97aE/L97bA/H99Q/C122S/Y149R/M157K;
I17V/F30Y/V38D/Y40H/V41R/L97bA/H99Q/C122S/M157K/T158A;
R35W/H37P/R37aN/V38E/T39Y/V41K/D60aP/Y60bD/T97a/L97bA/H99Q/C122S/Y151L/Q192T;
F30H/R35L/H37D/V38D/V41R/L97bA/H99Q/C122S/Y151L/M157K/R217E;
F30Y/R35W/R36H/H37D/R37aE/V38E/T39Y/Y40F/V41R/D60aE/Y60bF/T97aE/L97bA/H99Q/C122S/Y149R/M157K;
F30Y/R35L/R36H/H37G/V38E/T39Y/Y40H/V41R/Y60bP/T97aE/L97bA/H99Q/C122S/Y149M/M157K;
I17V/F30H/V38D/V41R/L97bA/H99Q/C122S/Y151L/M157K;
F30Y/R35V/R36H/H37K/V38E/T39F/Y40H/V41R/Y60bN/T97aI/L97bA/H99Q/C122S/Y149R/M157K;
R35W/R36H/H37N/V38E/T39F/Y40F/V41R/T97aI/L97bA/H99Q/C122S/Y149R/M157K/Q192H;
R35V/Y40Q/V41L/Y60bS/T97aE/L97bA/H99Q/C122S/Y149R;
F30Y/R35MV/R36H/H37G/R37aE/V38E/T39Y/Y40F/V41R/D60aP/Y60bS/T97aE/L97bA/H99Q/C122S/Y149R/M157K;
R35Q/V38D/V41R/L97bG/H99Q/C122S/Y151;
R37aS/V38E/Y40P/V41L/L97bG/H99Q/C122S/Y151Q/R217T;
R35V/R37aE/V38E/Y40Q/V41L/T97aE/L97bA/H99Q/C122S/Y149R;
F30H/V38D/V41R/A96G/L97bA/H99Q/C122S/Y151L/M157K;
T39L/Y40L/V41R/T97aI/L97bA/H99Q/C122S;
F30Y/R35W/R36H/H37E/V38E/T39Y/Y40F/V41R/Y60bQ/T97aE/L97bA/H99Q/C122S/Y149R/M157K Y40Q/V41L/Y60bL/L97bA/H99Q/C122S;
F30Y/R36H/V38E/Y40H/V41R/T97aI/L97bA/H99Q/C122S/S146F/M157K/Q192H/K243Q Y40Q/V41L/L97bA/H99Q/C122S/Y149R;
F30Y/R35W/R36Q/H37E/V38E/T39W/Y40H/V41R/Y60bQ/K61L/I65V/T97aE/L97bA/H99Q/C122S/Y149K1M157K;
R35Q/H37Y/R37aE/V38E/T39Y/V41R/D60aP/Y60bQ/T97aI/L97bA/H99Q/C122S/Y149R;
R35Q/V38D/V41R/T97aS/L97bA/H99Q/C122S/Y151L;
V41R/L97bR/H99Q/C122S/Y151L/R217V;
R35Q/H37Y/R37aE/V38E/T39Y/V41R/D60aP/Y60bQ/L97bA/H99Q/C122S/Y149R;
F30Y/R35V/R36H/H37S/V38E/T39Y/Y40H/V41R/Y60bP/T97aE/L97bA/H99Q/C122S/Y149E/M157K;
R35A/H37T/R37aD/V38E/T39Y/V41R/D60aP/Y60bD/T97aI/L97bA/H99Q/C122S/Y151L/Q192S;
R35S/V38D/V41R/L97bA/H99Q/C122S/Y151L;
R35S/V38D/V41L/L97bG/H99Q/C122S/Y151L/R217Q;
F30Y/R35H/V38D/Y40H/V41R/L97bA/H99Q/C122S/M157K/T158S;
R35Q/H37S/R37aE/V38E/T39Y/V41R/D60aP/Y60bS/T97aI/L97bA/H99Q/C122S/Y149R;
H37G/R37aD/V38F/T39H/V41R/Y60bK/L97bR/H99E/C122S/Y151L/E175D/Q192T/R217E/K224R;
H37G/R37aD/V38F/T39H/V41R/Y60bK/L97bR/H99E/C122S/Y151L/E175D/Q192T/R217E;
R35W/H37D/R37aS/V38E/T39Y/V41R/D60aE/Y60bS/T97a/L97bA/H99Q/C122S/Y149R;
R35Q/H37G/R37aD/V38E/T39Y/V41R/D60aP/Y60bA/T97a/L97bA/H99Q/C122S/Y149R;
R35Q/H37D/R37aK/V38E/T39F/V41R/D60aP/Y60bS/T97a/L97bA/H99Q/C122S/Y149R;
R35Y/R36H/H37S/V38D/T39Y/V41R/Y60bN/T97aI/L97bA/H99Q/C122S/Y149R;
F30Y/R36H/V38E/Y40H/V41R/K61E/T97aI/L97bA/H99Q/C122S/1157K;
R37aS/V38D/V41Q/L97bG/H99Q/C122S/Y151L/R217T;
F30H/V38D/V41R/L97bA/H99Q/C122S/Y151L/M157K;
F30Y/R35K/R36H/H37E/R37aK/V38E/T39F/Y40F/V41R/D60aP/Y60bS/T97aI/L97bA/H99Q/C122S/Y149R/M157K;
F30Y/R35Q/R36H/H37G/R37aE/V38E/T39Y/Y40F/V41R/D60aP/Y60bG/T97aI/L97bA/H99Q/C122S/Y149R/M157K;
F30Y/R35W/R36Q/H37E/V38A/T39W/Y40H/V41R/Y60bQ/K61D/I65V/T97aE/L97bA/H99Q/C122S/Y149K/M157K;
F30Y/R35H/V38D/Y40H/V41R/T56A/L97bA/H99Q/C122S/M157K;
R35N/H37T/R37aY/V38E/T39Y/V41R/D60aP/Y60bE/T97aI/L97bA/H99Q/C122S/Y149R;
R37aH/V38E/T39Y/V41R/T56A/D60aP/Y60bQ/L97bA/H99Q/C122S/T158A;
F30H/R35Q/H37T/V38D/V41R/L97bA/H99Q/C122S/Y151L/M157K;
F30H/R36L/V38E/V41R/K82R/L97bA/H99Q/C122S/Y151L/M157K;
V38D/V41R/H99Q/C122S/Y151L/R217V;
R35Q/H37G/R37aP/V38E/T39Y/V41R/D60aP/Y60bE/T97aI/L97bA/H99Q/C122S/Y149R;
F30Y/R35Q/R36H/H37Y/R37aE/V38E/T39Y/Y40F/V41R/D60aE/Y60bA/T97aE/L97bA/H99Q/C122S/Y149R/M157K;
R35Q/H37Y/R37aD/V38E/T39L/V41R/D60aE/Y60bT/T97a/L97bA/H99Q/C122S/Y149R;
F30Y/R35L/R36H/H37E/V38E/T39N/Y40F/V41R/T97aI/L97bA/H99Q/C122S/Y149R/M157K;
R36S/V38E/Y40L/V41N/L97bG/H99Q/C122S/Y151L/R217T;
T39W/V41R/L97bG/H99Q/C122S;
F30Y/R35W/R36H/H37E/V38E/T39W/Y40H/V41R/Y60bQ/T97aE/L97bA/H99Q/C122S/Y1491K/M157K;
R35Q/H37Y/R37aE/V38E/T39Y/V41R/Y60bQ/T97aI/L97bA/H99Q/C122S/Y149R;
R35S/R37aA/V38E/Y40Q/V41L/L97bA/H99Q/C122S/Y149V;
F30Y/R35W/R36H/H37Q/V38E/T39H/Y40H/V41R/T97aE/L97bA/H99Q/C122S/Y149L/M1 S7K;
F30Y/R35Q/R36H/H37Y/R37aD/V38E/T39Y/Y40F/V41R/Y60bV/T97aE/L97bA/H99Q/C122S/Y149R/M157K;
F30H/V38D/V41R/L97bA/H99Q/Y151L/M157K;
F30H/R35H/H3711V38D/V41R/L97bA/H99Q/C122S1Y149W1Y151L/M157K/R217S;
V38D/T39Y/Y40H/V41R/T97aI/L97bA/H99Q/C122S;
R35F/H37D/R37aN/V38E/T39Y/V41R/Y60bS/T97aI/L97bA/H99Q/C122S/Y149R;
T39Y/V41R/Y60bQ/L97bG/H99Q/C122S;
T39Y/V41R/D60aP/Y60bQ/L97bA/H99 Q/C122S;
V38D/V41R/L97bR/H99Q/C122S/Y151L/R217E;
R36 S/V38D/T39L/Y40L/V41R/L97bI/H99E/C122S/R217T;
R35S/R37aD/V38E/Y40Q/V41L/Y60b V/T97aL/L97bA/H99Q/C122S/Y149L;
Y40Q/V41L/Y60bT/T97aE/L97bA/H99Q/C122S/Y149R;
F30Y/V38E/Y40H/V41R/T56A/L97bA/H99Q/C122S/M157K/K243M;
F30Y/R36H/R37aH/V38E/Y40H/V41R/K61E/T97aI/L97bA/H99Q/C122S/M157K;
F30H/R35Q/V38D/V41R/L97bA/H99Q/C122S/Y151L/M157K;
V38D/V41R/Y60bK/T97aS/L97bR/H99E/C122S/Y151L/E175D/Q192T/R217E/K224R;
H37G/G37bD/V38F/T39H/V41R/Y60bK/T97aS/L97bR/H99E/C122S/Y151L/E175D/Q192T/R217E/K224R;
R35S/R37aD/V38E/Y40Q/V41L/T97aE/L97bA/H99Q/C122S/Y149R;
R35V/R37aE/V38E/Y40Q/V41L/Y60bS/T97aE/L97bA/H99Q/C122S;
Y40Q/V41L/Y60bS/T97aE/L97bA/H99Q/C122S/Y149R;
F30Y/R35H/V38D/Y40H/V41R/L97bA/H99Q/C122S/I138V/1157K;
T39Y/V41R/Y60bQ/L97bA/H99Q/C122S;
F30Y/R35H/R36H/H37D/R37aE/V38E/T39Y/Y40F/V41R/D60aP/Y60bD/T97aI/L97bA/H99Q/C122S/Y149R/M157K;
F30Y/V38D/Y40H/V41R/L97bA/H99Q/C122S/M157K/T158A;
V38E/T39W/V41R/D60aP/Y60bD/L97bA/H99L/C122S;
F30Y/R36H/V38E/Y40H/V41R/I65T/T97aI/L97bA/H99Q/C122S/M157K;
V38D/V41R/L97bR/H99Q/C122S/Y151L/R217V;
R35Q/H37S/R37aP/V38E/T39Y/V41R/D60aP/Y60bE/T97aI/L97bA/H99Q/C122S/Y149R;
R35W/R36H/H37S/V38E/T39Y/V41R/Y60bN/T97aE/L97bA/H99Q/C122S/Y149R/M157K;
R36S/V38E/Y40Q/V41R/L97bG/H99L/C122S/Y151P/R217E;
V38E/Y40Q/V41L/Y60bL/L97bA/H99Q/C122S;
H37G/R37aD/G37bD/V38F/T39H/V41R/Y60bK/L97bR/H99E/C122S/Y151L/E175D/Q192T/R217E;
H37G/R37aD/V38F/T39H/V41R/Y60bK/T97aS/L97bR/H99E/C122S/Y151L/E175D/Q192T/R217E;
F30Y/R35Y/R36H/H37K/V38E/T39F/Y40F/V41R/T97aI/L97bA/H99Q/C122S/Y149R/M157K/K187S/K223S/K224Y;
Y40Q/V41L/L97bA/H99Q/C122S;
F30H/R35H/V38D/V41R/K61E/L97bA/H99Q/C122S/Y151L/M157K/R206H;
F30Y/V38D/Y40H/V41R/L97bA/H99Q/C122S/M157K;
F30Y/R36H/V38E/Y40H/V41R/T97aE/L97bA/H99Q/C122S/Y149R/M157K;
R35A/R37aE/V38E/Y40Q/V41L/L97bA/H99Q/C122S/Y149R;
V38D/V41L/L97bG/H99Q/C122S/Y151L/R217Q;
F30H/R35Q/H37W/V38D/V41R/D60aE/L97bA/H99Q/C122S1Y149L/Y151L/M157K/R217D;
F30Y/R35F/R36H/H37G/V38E/T39Y/Y40H/V41R/Y60bS/T97aD/L97bA/H99Q/C122S/Y149R1M157K;
T39Y/V41R/L97bG/H99Q/C122S;
F30Y/R35I/R36H/H37E/V38E/T39Y/Y40H/V41R/Y60bS/T97aV/L97bA/H99Q/C122S/Y149L/M157K;
R35S/R37aD/V38E/Y40Q/V41L/L97bA/H99Q/C122S/Y149R;
Y40H/V41 Q/L97bG/H99Q/C122S/R217T;
R35W/H37D/V38D/T39Y/V41R/Y60bS/L97bA/H99Q/C122S/Y149R;
V38D/T39F/Y40L/V41R/T97aW/L97bA/H99Q/C122S;
V38D/T39Y/Y40L/V41R/T97aE/L97bA/H99Q/C122S;
F30Y/R35Q/R36H/H37G/R37aE/V38E/T39F/Y40F/V41R/D60aP/Y60bS/T97aE/L97bA/H99Q/C122S/Y149R/M157K;
V38D/T39L/Y40L/V41R/T97aI/L97bA/H99Q/C122S;
V38D/T39Y/Y40L/V41R/T97aW/L97bA/H99Q/C122S;
F30Y/R36H/V38D/Y40H/V41R/L97bA/H99L/C122S/F14L/M157K/T158A;
F30Y/R35Q/R36H/H37G/R37aE/V38E/T39Y/Y40F/V41R/D60aA/Y60bS/T97aE/L97bA/H99Q/C122S/Y149R/M157K;
F30Y/R35Q/R36H/H37G/R37aE/V38E/T39Y/Y40F/V41R/D60aP/Y60bS/T97aE/L97bA/H99Q/C122S/Y149R/M157K;
T39Y/V41R/Y60bP/L97bG/H99Q/C122S;
F30H/R36H/V38D/V41R/T56A/L97bA/H99Q/C122S/Y151L/M157K;
F30Y/R35E/R36H/H37D/R37aN/V38E/T39Y/Y40F/V41R/Y60bN/T97aE/L97bA/H99Q/C122S/Y149R/M157K;
V38E/Y40Q/V41L/D60aP/Y60bL/L97bA/H99Q/C122S/Y149W;
F30Y/R36H/V38E/Y40H/V41R/T97aI/L97bA/H99Q/C122S/M157K;
F30H/R35Q/H37 W/V38D/V41R/D60aE/Y60bS/L97bA/H99Q/C122S/Y149L/Y151L/M157K;
R35Q/H37G/R37aE/V38E/T39Y/V41R/D60aP/Y60bT/T97aI/L97bA/H99Q/C122S/Y149R;
F30Y/R35W/R36H/H37S/V38E/T39Y/Y40H/V41R/Y60bN/T97aE/L97bA/H99Q/C122S/Y149R/Y151P/M157K/Q192H;
F30Y/R35M1R36H/H37D/R37aD/V38E/T39Y/Y40F/V41R/D60aP/Y60bS/T97aE/L97bA/H99Q/C122S/Y149R/M157K;
F30Y/R35W/R36H/H37D/V38E/T39Y/Y40H/V41R/Y60bT/T97aD/L97bA/H99Q/C122S/Y149R/M157K;
V38D/T39L/Y40L/V41R/T97aV/L97bA/H99Q/C122S;
V38D/V41R/Y60bS/T97aI/L97bR/H99E/C122S/Y1 S1L/E175D/Q192F/R217E/K224R;
T39Y/V41R/Y60bP/L97bA/H99Q/C122S;
R36H/V38D/Y40F/V41R/D97E/A98G/T97adeI/H99L/L97bdeI/C122S/Y151L/Q192E/R217D;
R35M/H37G/R37aD/V38E/T39W/V41R/D60aP/Y60bD/T97a/L97bA/H99Q/C122S/Y149R;
F30Y/V38D/Y40L/V41R/L97bA/H99Q/C122S/Y151L/M157K/Q192H;
F30H/V38D/Y40F/V41R/L97bA/H99Q/C122S/Y151L/M157F;
H37M/R37aD/V38E/T39A/V41R/D60aP/Y60bS/T97aI/L97bA/H99Q/C122S/Y149R;
F30H/V38D/V41R/L97bA/H99Q/Y151L/M157K;
T22I/F30Y/R35S/V38D/Y40H/V41R/L97bA/H99Q/C122S/I138V/M157K;
R35L/H37D/R37aS/V38E/T39Y/V41R/D60aP/Y60bD/T97aI/L97bA/H99Q/C122S/Y149R;
F30Y/R35L/V38D/Y40H/V41R/N76S/L97bA/H99Q/C122S/M157K/K187E;
F30H/V38D/V41R/L97bA/H99Q/C122S/Y151L/M157S;
R35W/H37D/V38D/T39Y/V41R/Y60bH/L97bA/H99Q/C122S/Y149R;
F30Y/R36H/H37G/V38E/T39W/Y40H/V41R/Y60bA/T97aE/L97bA/H99Q/C122S/Y149Q/M157K;
R35Q/H37G/R37aE/V38W/T39Y/V41R/Y60bK/T97aS/L97bR/H99E/C122S/Y151L/E175D/Q192T/R217E/K224R;
H37G/R37aD/G37bD/V38F/T39H/V41R/Y60bK/L97bR/H99E/C122S/Y151L/E175D/Q192T/R217E/K224R;
V38D/T39Y/Y40M/V41R/T97aE/L97bA/H99Q/C122S;
R35Q/H37N/V38D/T39Y/V41R/Y60bP/L97bA/H99Q/C122S;
F30Y/R35W/R36H/H37D/V38E/T39Y/Y40F/V41R/Y60bS/T97aE/L97bA/H99Q/C122S/Y149K/M157K;
R35Q/R37aE/V38E/T39Y/V41R/D60aP/Y60bQ/T97aI/L97bA/H99Q/C122S/Y149R;
V38E/T39L/V41R/D60aN/Y60bP/L97bG/H99Q/C122S;
F30Y/R36H/H37A/V38E/T39Y/Y40H/V41R/Y60bQ/T97aV/L97bA/H99Q/C122S/Y149R/M157K;
F30Y/R35W/R36H/H37E/R37aP/V38E/T39Y/Y40F/V41R/Y60bN/T97aE/L97bA/H99Q/C122S/Y149Q/M157K;
H37T/R37aL/V38E/T39Y/V41R/D60aP/Y60bD/T97aI/L97bA/H99Q/C122S/Y151L/Q192R;
H37G/R37aD/V38F/T39H/V41R/Y60bK/T97aS/L97bR/H99E/C122S/Y151L/E175D/Q192T/R217E/K224R;
F30Y/R35W/R36H/H37S/V38E/Y40H/Y60bN/T97aE/L97bA/H99Q/C122S/Y149R/M157K;
V38D/T39W/Y40L/V41R/T97aL/L97bA/H99Q/C122S;
H37G/R37aD/G37bD/T39H/V41R/Y60bK/T97aS/L97bR/H99E/C122S/Y151L/E175D/Q192T/R217E/K224R;
T39Y/V41R/L97bA/H99Q/C122S;
V38D/T39L/Y40L/V41R/T97aW/L97bA/H99Q/C122S;
F30Y/R36H/V38E/Y40H/V41R/T97aI/L97bA/H99Q/C122S/Y149N/L150V/M157K;
R35 S/V38D/L97bA/H99Q/C122S/Y151L/M157Y;
R37aS/V38D/T39Y/Y40F/V41R/H99L/C122S/R217T;
Y40Q/V41L/Y60bE/L97bA/H99Q/C122S/Y149R;
Y40H/V41T/L97bG/H99Q/C122S/R217T; and
any of these polypeptides in which C122S is C122C, by chymotrypsin numbering.

17. The modified u-PA polypeptide of claim 1, comprising the amino acid modifications:
H37Y/R37aE/V38E/T39Y/V41R/D60aP/Y60bQ/T97aI/L97bA/H99Q/C122S/Y149R; or
R35Y/H37S/R37aP/V38E/T39Y/V41R/D60aP/Y60bD/T97aI/L97bA/H99Q/C122S/Y151L; or
R35Q/R37aE/V38E/T39Y/V41R/D60aP/Y60bQ/T97aI/L97bA/H99Q/C122S/Y149R; or
R35Q/H37Y/V38E/T39Y/V41R/D60aP/Y60bQ/T97aI/L97bA/H99Q/C122S/Y149R; or
R35Q/H37Y/R37aE/T39Y/V41R/D60aP/Y60bQ/T97aI/L97bA/H99Q/C122S/Y149R; or
R35Q/H37Y/R37aE/V38E/V41R/D60aP/Y60bQ/T97aI/L97bA/H99Q/C122S/Y149R; or
R35Q/H37Y/R37aE/V38E/T39Y/D60aP/Y60bQ/T97aI/L97bA/H99Q/C122S/Y149R; or
R35Q/H37Y/R37aE/V38E/T39Y/V41R/Y60bQ/T97aI/L97bA/H99Q/C122S/Y149R; or
R35Q/H37Y/R37aE/V38E/T39Y/V41R/D60aP/T97aI/L97bA/H99Q/C122S/Y149R; or
R35Q/H37Y/R37aE/V38E/T39Y/V41R/D60aP/Y60bQ/L97bA/H99Q/C122S/Y149R; or
R35Q/H37Y/R37aE/V38E/T39Y/V41R/D60aP/Y60bQ/T97aI/H99Q/C122S/Y149R; or
R35Q/H37Y/R37aE/V38E/T39Y/V41R/D60aP/Y60bQ/T97aI/L97bA/C122S/Y149R; or
R35Q/H37Y/R37aE/V38E/T39Y/V41R/D60aP/Y60bQ/T97aI/L97bA/H99Q/C122S; or
R35Q/H37Y/R37aE/V38E/T39Y/V41R/D60aA/Y60bP/T97aI/L97bA/H99Q/C122S/Y149R;
R35Q/H37Y/R37aE/V38E/T39Y/V41R/D60aT/Y60bT/T97aI/L97bA/H99Q/C122S/Y149R; or
R35L/H37D/R37aS/V38E/T39Y/V41R/D60aP/Y60bD/T97aI/L97bA/H99Q/C122S/Y149R; or
R35M/H37G/R37aD/V38E/T39W/V41R/D60aP/Y60bD/T97aI/L97bA/H99Q/C122S/Y149R; or
R35Q/H37G/R37aP/V38E/T39Y/V41R/D60aP/Y60bE/T97aI/L97bA/H99Q/C122S/Y149R; or
R35A/H37G/R37aE/V38E/T39F/V41R/D60aE/Y60bP/T97aI/L97bA/H99Q/C122S/Y149R; or
R35Q/H37S/R37aE/V38E/T39Y/V41R/D60aP/Y60bS/T97aI/L97bA/H99Q/C122S/Y149R; or
R35Q/H37T/R37aP/V38E/T39Y/V41R/D60aE/Y60bD/T97aI/L97bA/H99Q/C122S/Y149R; or
R35Q/H37G/R37aE/V38E/T39H/V41R/D60aP/Y60bA/T97aI/L97bA/H99Q/C122S/Y149R; or
R35W/H37D/R37aS/V38E/T39Y/V41R/D60aE/Y60bS/T97aI/L97bA/H99Q/C122S/Y149R; or
R35Q/H37G/R37aE/V38E/T39Y/V41R/D60aP/Y60bT/T97aI/L97bA/H99Q/C122S/Y149R; or
R35W/H37P/R37aN/V38E/T39Y/V41R/D60aP/Y60bL/D97T/T97aE/L97bG/A98S/H99L/C122S; or
R35W/H37P/R37aN/V38E/T39Y/V41K/D60aP/Y60bD/T97aI/L97bA/H99Q/C122S/Y151L/Q192A; or
R35Y/H37V/R37aW/V38E/T39Y/V41R/D60aP/Y60bE/T97aI/L97bA/H99Q/C122S/Y151L/Q192T; or
R35Y/H37S/R37aP/V38E/T39Y/V41R/D60aP/Y60bD/T97aI/L97bA/H99Q/C122S/Y151L; or
R35W/H37P/R37aN/V38E/T39Y/V41K/D60aP/Y60bD/T97aI/L97bA/H99Q/C122S/Y151L/Q192T; or
each of the foregoing with no replacement at C122.

18. The modified u-PA polypeptide of claim 1, comprising the amino acid modifications corresponding to Y40Q/V41L/L97bA/C122S or Y40Q/V41R/L97bA/C122S or Y40Q/V41L/L97bA or Y40Q/V41R/L97bA.

19. The modified u-PA polypeptide of claim 1, comprising the amino acid modifications corresponding to R37aS/V41R/L97bG/H99Q or R37aS/V41R/L97bG/H99Q/C122S.

20. The modified u-PA polypeptide of claim 1, comprising the amino acid modifications corresponding to T39Y/V41L/L97bA/H99Q/C122S or T39Y/V41R/L97bA/H99Q/C122S or T39Y/V41L/L97bA/H99Q or T39Y/V41R/L97bA/H99Q.

21. The modified u-PA polypeptide of claim 18, further comprising the replacement corresponding to H99Q.

22. The modified u-PA polypeptide of claim 1, comprising the amino acid replacements
R35Q/H37Y/R37aE/V38E/T39Y/V41R/D60aP/Y60bQ/T97aI/L97bA/H99Q/C122S/Y149R; or
R35Q/H37Y/R37aE/V38E/T39Y/V41R/D60aT/Y60bT/T97aI/L97bA/H99Q/C122S/Y149R; or
R35Q/H37Y/R37aE/V38E/T39Y/V41R/D60aP/Y60bQ/T97aI/L97bA/H99Q/Y149R; or
R35Q/H37Y/R37aE/V38E/T39Y/V41R/D60aT/Y60bT/T97aI/L97bA/H99Q/Y149R.

23. The modified u-PA polypeptide of claim 1, comprising the amino acid replacements
R35Q/H37Y/R37aE/V38E/T39Y/V41R/D60aT/Y60bT/T97aI/L97bA/H99Q/C122S/Y149R, or
R35Q/H37Y/R37aE/V38E/T39Y/V41R/D60aT/Y60bT/T97aI/L97bA/H99Q/Y149R.

24. The modified u-PA polypeptide of claim 1 comprising the amino acid modifications corresponding to
R35Q/H37Y/R37aE/V38E/T39Y/V41R/D60aP/Y60bQ/T97aI/L97bA/H99Q/C122S/Y149R or
R35Q/H37Y/R37aE/V38E/T39Y/V41R/D60aP/Y60bQ/T97aI/L97bA/H99Q/Y149R,
wherein the unmodified u-PA polypeptide comprises the protease domain set forth in SEQ ID NO:2 or SEQ ID NO:5.

25. The modified u-PA polypeptide of claim 23, wherein the unmodified polypeptide consists of the mature u-PA of SEQ ID NO:3 or SEQ ID NO:6.

26. The modified u-PA polypeptide of claim 1, wherein the modified u-PA polypeptide comprises the sequence of amino acid residues set forth in any of SEQ ID NOs: 8-44.

27. The modified u-PA polypeptide of claim 1, wherein the modified u-PA polypeptide comprises the sequence of amino acid residues set forth in SEQ ID NO:21 or SEQ ID NO: 18 or SEQ ID NO:987.

28. The modified u-PA polypeptide of claim 1 that comprises two chains and is activated, wherein the modified u-PA polypeptide contains the residue C, 122 that forms a disulfide bind with another free cysteine in the polypeptide.

29. The modified u-PA polypeptide of claim 1 that is conjugated to another moiety or polymer either directly or via a linker.

30. The modified u-PA polypeptide of claim 29, wherein the moiety or polymer increases serum half-life and/or to reduces immunogenicity or both.

31. The modified u-PA polypeptide of claim 1 that is PEGylated.

32. The modified u-PA polypeptide of claim 29 that is a fusion protein.

33. The modified u-PA polypeptide of claim 29 that is linked directly or indirectly to serum albumin.

34. The modified u-PA polypeptide of claim 33, wherein the serum albumin is a human serum albumin (HSA) that comprises the sequence of amino acids set for in SEQ ID NO: 991, or a form that has at least 90% or at least 95% sequence identity thereto.

35. The modified u-PA polypeptide of claim 29, that is conjugated to a polymer that is a polypeptide, wherein the polypeptide is multimerization domain.

36. The modified u-PA polypeptide of claim 35, wherein the multimerization domain is an Fc domain that comprises the sequence set forth in SEQ ID NO: 50 or SEQ ID NO:992 or a form that has at least 90% or at least 95% sequence identity thereto.

37. The modified u-PA polypeptide of claim 29, wherein the moiety or polymer is linked via a peptide linker to the modified u-PA polypeptide.

38. The modified u-PA polypeptide of claim 37, wherein the linker comprises Gly and/or Ser.

39. The modified u-PA polypeptide of claim 29, comprising the sequence of amino acid residues set forth in any of SEQ ID Nos: 1001-1003, 1024-1029, multimers thereof, and sequences having at least 99% sequence identity thereto.

40. A fusion protein, comprising a modified u-PA polypeptide or a catalytically active portion of a modified u-PA polypeptide of claim 1 that is fused to a non-protease polypeptide or a portion thereof.

41. The fusion protein of claim 40 that comprises a heterologous activation sequence or a u-PA activation sequence.

42. The fusion protein of claim 41, wherein the activation sequence comprises a cysteine, and the modified u-PA polypeptide comprises a free cysteine, whereby, upon activation, the resulting activated polypeptide comprises two chains.

43. The fusion protein of claim 41, wherein the activation sequence is a u-PA activation sequence or a furin activation sequence.

44. The fusion protein of claim 43, wherein the activation sequence is an activation sequence set forth in any of SEQ ID NOs:995-998, 1041, and 1044, or a sequence having at least 95% sequence identity to the sequence set forth in any of SEQ ID NOs:995-998, 1041, and 1044.

45. The fusion protein of claim 40 that comprises a signal sequence, wherein the signal sequence effects secretion of the fusion protein and is removed from the fusion protein.

46. The fusion protein of claim 40, comprising a fusion partner.

47. The fusion protein of claim 46, wherein the fusion partner is albumin, or an F, domain, or a single chain antibody or other antigen binding fragment of an antibody, or a hyaluronic acid binding domain (HABD), or an antibody or antigen binding fragment thereof that is an anti-type II collagen antibody scFv fragment or an anti-VEGFR antibody or fragment thereof.

48. The fusion protein of claim 40, comprising an activation sequence, a modified u-PA polypeptide, and HSA.

49. The fusion protein of claim 40, comprising the sequence of amino acids set forth in: a) any of SEQ ID Nos: 1004-1019 and 1034-1040, or b) a sequence having at least 95% sequence identity to the sequence of amino acids of any of SEQ ID Nos: 1004-1019 and 1034-1040, or c) a sequence of amino acids of a) or b) from which the signal sequence has been removed upon expression or is not included.

50. The fusion protein of claim 49, wherein the sequence of amino acids in a), b), and c) is the sequence set forth in any of SEQ ID NOs: 1006, 1007, 1009, and 1010.

51. The fusion protein of claim 49, wherein the sequence of amino acids in a), b), and c) is the sequence set forth in SEQ ID NO:1015 or 1019.

52. The fusion of claim 49 that is a two-chain activated form containing an A chain and a B chain.

53. The fusion protein of claim 52, wherein the B chain starts at residues IIGG of the modified u-PA polypeptide and ends at the C-terminus of the fusion protein.

54. The fusion protein of claim 52, comprising the sequence of amino acids set forth in any of SEQ ID NOs: 1005, 1011, 1014, 1015, 1016, 1019, and 1036, but lacking the signal sequence.

55. The fusion protein of claim 54, comprising an A chain of residues 21-178, and a B chain of residues 179- to the C-terminus of the protein with a disulfide linkage between residues 168-299.

56. The fusion protein of claim 54 that is a two chain activated fusion protein, comprising an A chain and a B chain, wherein the A chain consists of residues 21-178 of SEQ ID NO: 1015, and the B chain consists of residues 179-1022; and the A and B chains are linked via a disulfide bridge between C168 and C299 of SEQ ID NO:1015.

57. The fusion protein of claim 40 that comprises a multimerization domain, and that is a dimer via interaction of complementary multimerization domains.

58. The fusion protein of claim 57, wherein the multimerization domain is an F, domain.

59. The fusion protein of claim 57, wherein the modified u-PA polypeptide comprises the replacement C122S.

60. A nucleic acid molecule, comprising a sequence of nucleotides encoding a modified u-PA polypeptide of claim 1 or a fusion protein comprising the modified u-PA polypeptide of claim 1.

61. A vector, comprising the nucleic acid molecule of claim 60.

62. A method of treating a disease or condition mediated by or involving complement activation or reducing the risk of developing the disease or condition, comprising administering the modified u-PA polypeptide of claim 1, or a fusion protein comprising the modified u-PA polypeptide, or nucleic acid encoding the modified u-PA polypeptide or fusion protein, to a subject with the condition or disease.

63. The method of claim 62, wherein the modified u-PA polypeptide or fusion protein comprises a protease domain having the sequence of amino acids set forth in SEQ ID NO:21 or SEQ ID NO:987, or the nucleic acid encodes a modified u-PA polypeptide or fusion protein comprising the sequence of amino acids set forth in SEQ ID NO:21 or SEQ ID NO:987.

64. The method of claim 62, wherein the complement-mediated disease or condition is selected from among inflammatory diseases and conditions.

65. The method of claim 62, wherein the complement-mediated disease or condition is selected from among: Complement 3 Glomerulopathy (C3G), atypical hemolytic uremic syndrome (aHUS), sepsis, rheumatoid arthritis (RA), a cardiovascular disease, membranoproliferative diseases and conditions, ophthalmic or ocular diseases or disorders, membranoproliferative glomerulonephritis (MPGN), multiple sclerosis (MS), myasthenia gravis (MG), asthma, inflammatory bowel disease, immune complex (IC)-mediated acute inflammatory tissue injury, Alzheimer's Disease (AD), transplanted organ rejection, and ischemia-reperfusion injury.

66. The method of claim 65, wherein the disease or condition is an ocular or ophthalmic disease or is rejection or inflammation due to a transplanted organ.

67. The method of claim 65, wherein the disease or condition is a diabetic retinopathy or age-related macular degeneration (AMD).

68. An isolated cell or a cell culture, comprising the nucleic acid of claim 60, wherein the isolated cell is not a human zygote.

69. A method of producing a modified u-PA polypeptide or fusion protein comprising the modified u-PA polypeptide, comprising culturing the cell or cell culture of claim 68 under conditions for expression of the encoded modified u-PA polypeptide or fusion protein.

70. A pharmaceutical composition, comprising a modified u-PA polypeptide of claim 1, or a fusion protein comprising the a modified u-PA polypeptide of claim 1, or nucleic acid encoding the modified u-PA polypeptide or fusion protein.

71. The pharmaceutical composition of claim 70, wherein the modified u-PA polypeptide or fusion protein is in a two-chain activated form.

72. The pharmaceutical composition of claim 71, wherein the modified u-PA polypeptide or fusion protein comprises a protease domain having the sequence of amino acids set forth in SEQ ID NO:21 or SEQ ID NO:987, or the nucleic acid encodes a modified u-PA polypeptide or fusion protein comprising the sequence of amino acids set forth in SEQ ID NO:21 or SEQ ID NO:987.

73. The pharmaceutical composition of claim 70, wherein the modified u-PA polypeptide or fusion protein has the sequence set forth in SEQ ID NO: 1015 or 1019.
